(19) United States
(12) Patent Application Publication
(10) Pub. No.: US 2013/0197056 A1
(43) Pub. Date: Aug. 1, 2013

(54) NOVEL BIOMARKERS AND TARGETS FOR OVARIAN CARCINOMA

(71) Applicants: David G. Huntsman, Vancouver (CA); Marco Marra, Vancouver (CA); Kimberly Wiegand, Vancouver (CA); Martin Hirst, Delta (CA); Sohrab Prakash Shah, Vancouver (CA)

(72) Inventors: David G. Huntsman, Vancouver (CA); Marco Marra, Vancouver (CA); Kimberly Wiegand, Vancouver (CA); Martin Hirst, Delta (CA); Sohrab Prakash Shah, Vancouver (CA)

(73) Assignee: BRITISH COLUMBIA CANCER AGENCY BRANCH, Vancouver (CA)

(21) Appl. No.: 13/642,337

(22) PCT Filed: Apr. 22, 2011
(86) PCT No.: PCT/IB11/51763

§ 371 Date: Nov. 7, 2012

Related U.S. Application Data
(60) Provisional application No. 61/326,859, filed on Apr. 22, 2010.
(60) Provisional application No. 61/368,596, filed on Jul. 28, 2010.

(51) Int. Cl. G01N 33/68; C12N 15/10; A61K 31/713; C12Q 1/68

(52) U.S. Cl. CPC G01N 33/689; C12Q 1/6886; C12N 15/1079; A61K 31/713
USPC 514/44 A; 435/7.4; 435/6.11; 506/10; 435/6.13; 506/9; 506/2

(57) ABSTRACT

Novel biomarkers and targets associated with ovarian cancer, particularly clear-cell carcinoma, endometrioid carcinoma, and uterine carcinoma, are disclosed. Mutations in genes encoding proteins that form part of the SWI/SNF chromatin remodelling protein complex, including ARID1A, or loss of expression of such proteins, including BAF250a, can be used to evaluate the likelihood endometriosis will progress or transform to cancer, to provide a prognosis for a patient with cancer, to assess whether conventional treatment is likely to be effective against a cancer, and/or in a synthetic lethal screen to identify novel targets and therapeutics for the treatment of cancer.

### REFERENCE TO RELATED APPLICATIONS

[0001] This application claims the benefit of U.S. provisional patent application No. 61/326,859 filed 22 Apr. 2010 and U.S. provisional patent application No. 61/368,596, filed 28 Jul. 2010, both entitled NOVEL MARKERS AND THERAPEUTIC TARGETS FOR CLEAR CELL CARCINOMA OF THE OVARY, each of which is expressly incorporated by reference herein.

### TECHNICAL FIELD

[0002] Embodiments of this invention relate to improved methods for therapy, diagnosis, prognosis, and predicting response to treatment of certain types of cancer, and to methods for screening for and developing novel targets, biomarkers and therapeutics for treating certain types of cancer. Embodiments of the invention have particular application in methods for therapy, diagnosis, prognosis and predicting response to treatment of clear cell carcinoma of the ovary, endometrioid carcinoma, and uterine carcinoma, and to methods of screening for and developing novel therapeutics for treating clear cell carcinoma of the ovary, endometrioid carcinoma, and uterine carcinoma.

### BACKGROUND

[0003] In North America, ovarian cancer is the leading cause of death due to gynaecological malignancies and is the fifth leading cause of cancer death in Canadian women. Ovarian cancers can be divided into subtypes based on their tumour cell types. Clear cell carcinomas (CCC) of the ovary are one of the ovarian cancer subtypes and represent approximately 12% of all malignant ovarian tumours. Though they are intrinsically resistant to traditional platinum and taxane therapies, these cancers are still treated similarly to other ovarian cancers. Patients with CCC are therefore exposed to treatment which is ineffective, toxic, and expensive and there are currently no alternative anti-cancer agents effective for this disease. Thus, due to the limited success of traditional chemotherapy, there is an urgent need for more effective treatments which are specific to the CCC subtype of ovarian cancer.

### Epithelial Ovarian Cancer

[0004] Epithelial ovarian cancer is the fifth leading cause of cancer death and second most common gynaecological malignancy in Canada. There are several subtypes of epithelial ovarian cancer. High grade serous cancers are the most common and account for approximately 70% of all cases. CCCs are the second most common subtype (12% of cases) and the second leading cause of ovarian cancer associated deaths. Whereas high grade serous cancers are the subject of The Cancer Genome Atlas Project, CCCs are relatively understudied.

### Clinical, Pathological, and Molecular Characteristics of Clear Cell Carcinomas

[0005] Despite evidence that ovarian carcinoma subtypes are essentially different diseases^{3,4}, it is current practice to treat them all with platinum/taxane chemotherapy. CCCs, however, respond extremely poorly to this treatment⁵⁻⁷ with response rates of 15% compared to 80% for high grade serous carcinomas⁴. CCCs have a low mitotic rate^{4,8}, are genetically stable, diploid or tetraploid and develop from well-established precursor lesions. They do not exhibit the complex karyotypes or chromosomal instability associated with high grade serous cancers^{8,9}, which may contribute to their chemoresistance. CCCs are often diagnosed at an early stage, with 80% of cases presenting with stage I or II carcinoma^{10,11}, however survival rates for stage I/II CCC are significantly lower (60%) compared to patients with other ovarian cancer subtypes presenting with stage I/II disease^{7,12}. There are currently no effective anti-cancer agents for CCCs.

[0006] CCCs are defined based on histopathological findings as tumours composed predominantly of clear cells and hobnail cells¹³. While CCC express hepatocyte nuclear factor-1beta, they rarely express biomarkers commonly associated with high grade serous or other ovarian cancers⁴ and the distinctive CCC immunophenotype can be used as an aid in diagnostically challenging cases¹⁴. The most commonly mutated gene in CCC is PIK3CA (present in 14%-50% of cases)¹⁵⁻¹⁹. By contrast, BRCA1, BRCA2, and TP53 mutations are commonly found in high grade serous cancers but are typically absent in CCCs^{19,20}. Though there is an association between both CCCs and low-grade endometrioid carcinomas with endometriosis²¹, the mechanism of this transformation was previously unknown for CCCs. In addition, CCCs can arise from adenofibromas^{22,23}. CCCs are aggressive cancers untreatable with current chemotherapy, are poorly understood, and remain relatively understudied. In addition, they are genomically stable^{8,9}.

### Next Generation Sequencing

[0007] Next generation sequencing technology is based on massively parallel single molecule sequencing to cost-effectively produce millions of short sequence reads. This technology can fully interrogate genomes or transcriptomes at a single base resolution for single nucleotide variance, splice variants, genome rearrangements, copy number changes, inversions, and insertions and deletions²⁴. In the case of paired-end sequencing, next generation sequencing technology generates millions of randomly fragmented, short sequenced reads that flank longer unsequenced regions. Data is generated using a four-color DNA “sequencing-by-synthesis” technology followed by fluorescence detection. After completion of the first read, templates are regenerated in situ to enable a second read from the opposite end of the fragments, producing end-sequence pairs. It is possible to use this technology for whole genome analysis, however this is much more costly than RNA-seq (whole transcriptome analysis) which sequences cDNAs generated from total mRNA. Resulting paired-end reads are aligned to a reference sequence (e.g. NCBI build 36.1, hg18) which produces relevant data on each read, such as location within the transcriptome, quality of read, number of mismatches, and paired-end flags. Single nucleotide variants (SNVs) are predicted based on discrepancies between the reference genome and the aligned mapped reads. Fusion transcripts and other rearrangements are recognized by identifying all mate-pairs that do not align canonically in pairs to the human genome.

### The SWI/SNF Complex

[0008] Chromosomal DNA is wound around proteins called histones to form a complex structure called chromatin. The basic unit of chromatin is the nucleosome which is composed of DNA wrapped around eight histone proteins. Nucleosomes are connected by linker DNA, similar to beads on a string. Further coiling or condensation of chromatin creates a higher order structure known as heterochromatin. DNA organized into heterochromatin is inaccessible to transcriptional machinery. Chromatin remodelling, either through covalent modification of histones or through the mobilization of nucleosomes, is required before DNA can be accessed for transcriptional initiation.

[0009] The SWI/SNF protein complex uses ATP hydrolysis to mobilize nucleosomes which modulates accessibility to transcription machinery. The SWI/SNF protein complex is typically associated with transcriptional activation or repression and functions at the promoter. This complex is present in all eukaryotes and is essential for many cellular processes including development, differentiation, proliferation, DNA repair, and tumour suppression²⁶. The complex is comprised of one of two ATPases, BRM (Brahma) or BRG1 (Brahma-Related Gene 1)^{27,28}, along with conserved core subunits and variable accessory proteins termed BAFs (BRM- or BRG1-associated factors) (FIG. 1). The specific combination of proteins within different complexes is believed to confer specificity with respect to gene regulation.

[0010] BRG1 containing SWI/SNF complexes contain either BAF250 or BAF180, while BRM complexes contain only BAF250. There are two BAF250 proteins which are encoded by paralogous genes. BAF250a (also referred to as p270) is encoded by the ARID1A gene and BAF250b is encoded by the ARID1B gene. These proteins are mutually exclusive within BRG1 or BRM containing SWI/SNF complexes²⁹.

Co-immunoprecipitation studies indicate that BAF250a and BAF250b interact with BRG1 and BRM through their C-terminal domains³⁰ and the interaction between BAF250a and BRG1 has been shown to be required for transactivation of the MMTV (mouse mammary tumour virus) promoter³¹. This steroid hormone responsive promoter is often used as part of a model system to study transcriptional activation from SWI/SNF-mediated chromatin remodelling. Specifically, BAF250a has been shown to stimulate glucocorticoid receptor-mediated transactivation; this requires the presence of the BAF250a C-terminus which can directly interact with the glucocorticoid receptor in vitro³².

[0011] There remains an unmet need in the oncology field for new treatment modalities that specifically target the molecular defects driving the pathogenensis of CCC, endometrioid carcinoma (EC), and uterine carcinoma. There is a need for novel prognostic, diagnostic and predictive (response to treatment) markers for CCC, EC, and uterine carcinoma. There is a need for novel therapeutic targets for treatment of CCC, EC, and uterine carcinoma, methods for identifying such novel therapeutic targets, and therapeutic agents for treating these cancers.

### SUMMARY

[0012] The following embodiments and aspects thereof are described and illustrated in conjunction with systems, tools and methods which are meant to be exemplary and illustrative, not limiting in scope. In various embodiments, one or more of the above-described problems have been reduced or eliminated, while other embodiments are directed to other improvements.

[0013] Embodiments of the invention provide novel biomarkers and therapeutic targets for treatment of certain types of cancer, including CCC, EC, and uterine carcinoma. Mutations in genes encoding proteins that form part of the SWI/SNF chromatin remodelling protein complex, including ARID1A, or loss of expression of such proteins, including BAF250a, can be used to evaluate the likelihood endometriosis will progress or transform to cancer, to provide a prognosis for a patient with cancer, to assess whether conventional treatment is likely to be effective against a cancer, and/or in a synthetic lethal screen to identify novel targets and therapeutics for the treatment of cancer.

[0014] Mutations in ARID1A or other genes encoding proteins that are components of the SWI/SNF complex can be assessed by assaying for the presence of such mutations in a sample of tissue obtained from a site of endometriosis or a carcinoma of a subject. Techniques that may be used to confirm the presence of mutations in ARID1A include Sanger sequencing of the tissue sample or next generation sequencing of the tissue sample, PCR-based methods including Amplification Refractory Mutation System (ARMS)-based PCR, or TaqMan™ assays, or hybridization-based methods including fluorescence in-situ hybridization (FISH), or any other suitable detection technique.

[0015] Loss of expression of proteins that are components of the SWI/SNF complex, including BAF250a, can be assessed by obtaining a sample of tissue from a site of endometriosis or a carcinoma of a subject for expression of that protein, for example using immunohistochemistry.

[0016] In some embodiments, cells having mutations in ARID1A or other genes encoding proteins that are components of the SWI/SNF complex can be used in a synthetic lethal screen to identify new targets for the treatment of CCC, EC and uterine carcinoma. In some embodiments, targets identified by such screens can be used to screen for novel therapeutics useful in the treatment of CCC, EC and uterine carcinoma.

[0017] In addition to the exemplary aspects and embodiments described above, further aspects and embodiments will become apparent by reference to the drawings and by study of the following detailed descriptions.

### BRIEF DESCRIPTION OF DRAWINGS

[0018] Exemplary embodiments are illustrated in referenced figures of the drawings. It is intended that the embodiments and figures disclosed herein are to be considered illustrative rather than restrictive.

[0019] FIG. 1 shows a schematic overview of the protein components of the SWI/SNF complex and lists the fifteen genes that encode components of the SWI/SNF complex.

[0020] FIG. 2 shows a schematic overview of the ARID1A cDNA (from ATG start to TGA stop) and BAF250a protein. Mutations identified by the inventors by transcriptome (RNA) sequencing are summarized above the schematic. Mutations identified by the inventors by targeted exon resequencing and Sanger sequencing of genomic DNA are shown below the schematic. Numbers 1 through 6858 below the schematic indicate the nucleotide (nt) position, starting with the A in the ATG start codon for ARID1A in position 1 (based on the sequence given in record number NM_{—}006015.4 in Entrez Gene). UTR denotes untranslated region.

[0021] FIG. 3 summarizes mutations identified by RNA sequencing and exon resequencing of 19 specimens of CCC.

[0022] FIG. 4 summarizes the results of sequence analysis, tumor and germline validation, and BAF250a expression measured for samples exhibiting mutations in ARID1A. The SEQ ID NO. of each mutant gene sequence is listed.

[0023] FIG. 5 summarizes mutations in genes other than ARID1A identified by RNA sequencing of 19 specimens of CCC.

[0024] FIG. 6 shows BAF250a expression, ARID1A mutations, and loss of heterozygosity in CCC23 and corresponding endometriotic precursor lesions.

[0025] FIG. 7 shows results of Sanger sequencing, RNA sequencing, and immunohistochemical staining of BAF250a in case CCC 14.

[0026] FIG. 8 shows immunofluorescence demonstrating knockdown of BAF250a expression through stable expression ARID1A shRNA in HCT 116 cells. Picture taken at 63× magnification.

[0027] FIG. 9 shows the correlation between ARID1A mutation status and the presence of endometriosis at the time of surgery for 119 samples of CCC and EC.

[0028] FIG. 10 lists the primer sequences used for validating the sequence of ARID1A by targeted exon resequencing.

[0029] FIG. 11 shows the sequence prediction for the ARID1A-ZDHHC18 fusion identified by RNA sequencing.

[0030] FIG. 12 shows the mutational status and corresponding expression of BAF250a in the discovery and mutation-validation cohorts according to carcinoma type.

[0031] FIG. 13 shows BAF250a expression in tumors (with the number and total number in parentheses) from three subtypes of ovarian cancer—clear-cell carcinoma (CCC), endometrioid carcinoma (EC), and high-grade serous (HGS) carcinoma.

[0032] FIG. 14 shows experimental results for CCC23 and adjacent atypical endometriosis.

[0033] FIG. 15 shows the results of analysis of clear cell carcinoma from specimen CCC13 and adjacent atypical endometriosis.

[0034] FIG. 16 shows Sanger sequencing results from CCC13.

[0035] FIG. 17 shows a table summarizing the results of immunohistochemstry for BAF250a expression in the tissue microarrays studied.

[0036] FIG. 18 shows immunostaining for BAF250a expression in diverse malignancies, including: (A) DLBCL (diffuse large B-cell lymphoma), (B) MCL (mantle cell lymphoma), (C) follicular lymphoma, (D) oral cancer, (E) gastric cancer, (F) anaplastic thyroid cancer, (G) renal cancer, (H) pancreatic cancer, (I) GIST (gastrointestinal stromal tumor), (J) breast cancer, (K) cervical cancer, and (L) sex cord-stromal tumours. Loss of BAF250a is demonstrated in gastric cancer (E), as shown by lack of tumour cell staining and positive stromal staining; all other panels demonstrate positive BAF250a staining. Images were captured at 20× magnification.

[0037] FIG. 19 shows that high-grade malignancies of the endometrium show loss of BAF250a expression. Tissue cores of (A) high-grade endometroid carcinoma, (B) clear cell carcinoma, (C) high-grade serous carcinoma, and (D) carcinosarcoma. For all panels, note the lack of BAF250a immunostaining in the tumour cells, while the adjacent normeoplastic stromal cells show positive BAF250a nuclear staining. Original magnification for all panels, 20×.

[0038] FIG. 20 shows a biopsy from cul-de-sac showing endometriosis, with endometrial-type glands and stroma. (A) On H&E staining there is focal cytological atypia of the glandular epithelium (arrowhead), while other glandular epithelial cells do not show atypia (arrow). (B) Immunostaining for BAF250a shows loss of expression in the glandular epithelial cells of atypical endometriosis (arrowhead), with expression in non-atypical glandular epithelial cells and in endometrial stromal cells (arrow). Panels (A) and (B) were captured at 20×. Panels (C) and (D) show 40× magnification for the H&E and BAF250a IHC, respectively, for the nonatypical glandular epithelial cells. Panels (E) and (F) show 40× magnification for the H&E and BAF250a IHC, respectively, for the atypical endometriosis.

[0039] FIG. 21 shows the 50 genes found to have the greatest differential expression versus wild type in cells having an ARID1A mutation.

[0040] FIG. 22 shows a flowchart for experiments that will be conducted to assess the effect of ARID1A mutations on cell growth.

### DESCRIPTION

[0041] Throughout the following description specific details are set forth in order to provide a more thorough understanding to persons skilled in the art. However, well known elements may not have been shown or described in detail to avoid unnecessarily obscuring the disclosure. Accordingly, the description and drawings are to be regarded in an illustrative, rather than a restrictive, sense.

[0042] For further clarity, database identifiers for the ARID1A gene, RNA and protein are as follows: Entrez Gene: 8289; UniProtKB/Swiss-Prot: ARI1A HUMAN, O14497; RefSeq DNA sequence: NC_{—}000001.10 NT_{—}004610.19; REFSEQ mRNAs for ARID1A gene (2 alternative transcripts): NM_{—}006015.4 NM_{—}139135.2. The wild-type sequence for ARID1A (NM_{—}006015.4) is set forth in SEQ ID NO.:1.

[0043] The inventors have now discovered that mutations in genes encoding proteins that are components of the SWI/SNF complex are useful as biomarkers or targets to assist in the diagnosis, prognosis and treatment of, and development of therapeutic agents for, certain types of cancer including clear cell carcinoma (CCC) of the ovary, endometrioid carcinoma (EC), and uterine carcinoma. The inventors have demonstrated that such mutations are relatively common in endometrial carcinomas but relatively infrequent in other types of cancer. The mechanism of progression of cancer involving these mutations appears to be distinct from other known mechanisms of cancer development. See also Wiegand et al., N. Engl. J. Med. 2010, 363:1532-1543, and the Supplementary Appendix thereto, both of which are hereby incorporated by reference herein.

[0044] Ovarian CCC and EC are thought to arise from endometriosis. The presence of nonsense mutations, significant missense mutations, or genetic rearrangements in genes encoding proteins that are important to the proper functioning of the SWI/SNF complex in endometriosis may indicate a risk of malignant progression or transformation of endometriosis to these cancers or other types of ovarian cancers, a poor prognosis for a patient having a form of cancer with such mutations, or a likelihood that standard chemotherapeutic agents such as platinum or taxane therapeutics are unlikely to be effective in treating a form of cancer with such mutations. A lack of expression of proteins that are important to the proper functioning of the SWI/SNF complex in endometriosis may indicate a risk of malignant progression or transformation of endometriosis to these cancers or other types of ovarian cancers. A lack of expression of proteins that are important to the proper functioning of the SWI/SNF complex in a carcinoma may indicate a poor prognosis for a patient with the carcinoma, and/or a likelihood that standard chemotherapeutic agents such as platinum or taxane therapeutics are unlikely to be effective in treating that carcinoma.

[0045] As used herein, the term “significant mutation” when used with reference to a gene means a mutation in the DNA sequence of the gene that produces a mutated protein that is not able to fully perform the typical function of that protein. The term “significant mutation” when used with reference to a protein means a mutation in the DNA sequence encoding that protein that produces a mutated protein product that is not able to fully perform the typical function of that protein, and includes all mutations equivalent thereto by reason of the degeneracy of the genetic code. A significant mutation could include a truncation mutation, a nonsense mutation, a significant missense mutation, and/or a genetic rearrangement.

[0046] As used herein, the term “poor prognosis” means a significant prospect that a patient with cancer will suffer a negative outcome, e.g. morbidity or death, as a result of the cancer.

[0047] Embodiments of the invention provide novel targets and molecular defects associated with the development and pathogenesis of CCC of the ovary, EC and uterine carcinoma. These targets and defects are distinct from those characteristic of other types of ovarian cancer and will enable the development of new therapies effective for treatment of CCC of the ovary, EC and uterine carcinoma.

[0048] Embodiments of the invention provide novel biomarkers useful for the prognosis of CCC of the ovary, EC and uterine carcinoma. Embodiments of the invention provide novel biomarkers to enable prediction of the risk of malignant progression (or transformation) of endometriotic lesions (endometriosis) to these cancers or other types of ovarian cancer.

[0049] Embodiments of the invention provide novel biomarkers useful for predicting response to treatment (chemotherapy, radiation, targeted drug therapy and the like) of patients with CCC of the ovary, EC and uterine carcinoma.

[0050] In one aspect of the invention, mutations in one or more of the genes/proteins comprising the SWI/SNF chromatin remodelling complex are markers that are useful as therapeutic targets, or to enable the development of therapeutic targets for treatment of CCC of the ovary, EC and uterine carcinoma.

[0051] In another aspect of the invention, mutations in one or more of the genes/proteins comprising the SWI/SNF chromatin remodelling complex are novel biomarkers useful for the prognosis of CCC of the ovary, EC and uterine carcinoma and for prediction of the risk of malignant progression (or transformation) of endometriotic lesions (endometriosis).

[0052] In another aspect of the invention, mutations in one or more of the genes/proteins comprising the SWI/SNF chromatin remodelling complex are novel biomarkers that are useful for predicting response to treatment (chemotherapy, radiation, targeted drug therapy and the like) of patients with CCC of the ovary, EC and uterine carcinoma.

[0053] In another aspect of the invention, one or more mutations in the gene ARID1A (encoding protein BAF250a (also referred to as p270)), a component of the SWI/SNF chromatin remodelling complex, are markers that are useful as therapeutic targets, or to enable the development of therapeutic targets for treatment of CCC of the ovary, EC and uterine carcinoma.

[0054] In another aspect of the invention, one or more mutations in the gene ARID1A (encoding protein BAF250a (also referred to as p270)), a component of the SWI/SNF chromatin remodelling complex, are novel biomarkers useful for the prognosis of CCC of the ovary, EC and uterine carcinoma and for prediction of the risk of malignant progression (or transformation) of endometriotic lesions (endometriosis).

[0055] In another aspect of the invention, one or more mutations in the gene ARID1A (encoding protein BAF250a (also referred to as p270)), a component of the SWI/SNF chromatin remodelling complex, are novel biomarkers that are useful for predicting response to treatment (chemotherapy, radiation, targeted drug therapy and the like) of patients with CCC of the ovary, EC and uterine carcinoma.

[0056] In an aspect of the invention, one or more of the mutations in SEQ ID NO.:2 through SEQ ID NO.:122 (shown in FIG. 4 of this specification) in the gene ARID1A (encoding protein BAF250a (also referred to as p270)), a component of the SWI/SNF chromatin remodelling complex, are markers that are useful as therapeutic targets, or to enable the development of therapeutic targets for treatment of CCC of the ovary, EC and uterine carcinoma.

[0057] In another aspect of the invention, one or more of the mutations in SEQ ID NO.:2 through SEQ ID NO.:122 (shown in FIG. 4 of this specification) in the gene ARID1A (encoding protein BAF250a (also referred to as p270)), a component of the SWI/SNF chromatin remodelling complex, are novel biomarkers useful for the prognosis of CCC of the ovary, EC and uterine carcinoma and for prediction of the risk of malignant progression (or transformation) of endometriotic lesions (endometriosis).

[0058] In an aspect of the invention, one or more of the mutations in SEQ ID NO.:2 through SEQ ID NO.:122 (shown in FIG. 4 of this specification) in the gene ARID1A (encoding protein BAF250a (also referred to as p270)), a component of the SWI/SNF chromatin remodelling complex, are novel biomarkers that are useful for predicting response to treatment (chemotherapy, radiation, targeted drug therapy and the like) of patients with CCC of the ovary, EC and uterine carcinoma.

[0059] In an aspect of the invention, one or more mutations (shown in FIG. 5 of this specification) in the genes SMARCA4 (encodes for the protein BRG1), PBRM1 (encodes for the protein BAF180) or SMARCC2 (encodes for the protein BAF170), all components of the SWI/SNF chromatin remodelling complex, are markers that are useful as therapeutic targets, or to enable the development of therapeutic targets for treatment of CCC of the ovary, EC and uterine carcinoma.

[0060] In another aspect of the invention, one or more mutations (shown in FIG. 5 of this specification) in the genes SMARCA4 (encodes for the protein BRG1), PBRM1 (encodes for the protein BAF180) or SMARCC2 (encodes for the protein BAF170), all components of the SWI/SNF chromatin remodelling complex, are novel biomarkers useful for the prognosis of CCC of the ovary, EC and uterine carcinoma and for prediction of the risk of malignant progression (or transformation) of endometriotic lesions (endometriosis).

[0061] In another aspect of the invention, one or more mutations (shown in FIG. 5 of this specification) in the genes SMARCA4 (encodes for the protein BRG1), PBRM1 (encodes for the protein BAF180) or SMARCC2 (encodes for the protein BAF170), all components of the SWI/SNF chromatin remodelling complex, are novel biomarkers that are useful for predicting response to treatment (chemotherapy, radiation, targeted drug therapy and the like) of patients with CCC of the ovary, EC and uterine carcinoma.

[0062] In some embodiments, the presence of mutations in one or more genes that encode components of the SWI/SNF complex that disrupt the function or expression of the corresponding protein products in a sample of tissue obtained from a pre-cancerous lesion of a subject indicates a risk of malignant progression or transformation of the lesion to cancer. The presence of mutations in such genes can be determined by any suitable method, such as, for example, Sanger sequencing of the tissue sample or next generation sequencing of the tissue sample, PCR-based methods including ARMS-based PCR, fluorescence in situ hybridization (FISH), or other suitable detection technique. In some embodiments, the one or more genes are ARID1B, ARID2, SMARCA2, SMARCC1, SMARCD1, SMARCD2, SMARCD3, SMARCE1, ACTL6A, ACTL6B, or SCMARCB1.

[0063] In some embodiments, the absence of expression of one or more proteins that are components of the SWI/SNF complex in a sample of tissue obtained from a pre-cancerous lesion of a subject indicates a risk of malignant progression or transformation of the pre-cancerous lesion to cancer. The expression level of the proteins in the tissue sample may be determined in any suitable manner, including for example immunohistochemistry. In some embodiments, the proteins are BAF250b, BAF200, BRM, BAF155, BAF60a, BAF60b, BAF60c, BAF57, BAF53a, BAF53b, or BAF47.

[0064] In some embodiments, the presence of mutations in ARID1A, a gene encoding the protein BAF250a, that disrupt the function or expression of BAF250a in a sample of tissue obtained from an endometriotic lesion of a subject indicates a risk of malignant progression or transformation of the endometriotic lesion to cancers such as CCC, EC or uterine cancer. The presence of mutations in ARID1A in the tissue sample can be determined by any suitable method, such as, for example, Sanger sequencing of the tissue sample or next generation sequencing of the tissue sample, PCR-based methods including ARMS-based PCR, FISH, or other suitable detection technique.

[0065] In some embodiments, the mutations in ARID1A that indicate a risk of malignant progression or transformation of the endometriotic lesion to cancers such as CCC, EC or uterine cancer include the mutations set forth in SEQ ID NO.:2 through SEQ ID NO.:122 (shown in FIG. 4).

[0066] In some embodiments, the absence of expression of BAF250a in a sample of tissue obtained from an endometriotic lesion of a subject indicates a risk of malignant progression or transformation of the endometriotic lesion to cancers such as CCC, EC or uterine cancer. The expression level of BAF250a in the tissue sample may be determined in any suitable manner, including for example immunohistochemistry.

[0067] In some embodiments, the mutations in BAF250a that indicate a risk of malignant progression or transformation of the endometriotic lesion to cancers such as CCC, EC or uterine cancer include the mutations set forth in FIG. 4.

[0068] In some embodiments, the presence of mutations in SMARCA4, PBRM1, or SMARCC2 that disrupts the function or expression of BRG1, BAF180, or BAF170, respectively, in a sample of tissue obtained from an endometriotic lesion of a subject indicates a risk of malignant progression or transformation of the endometriotic lesion to cancers such as CCC, EC or uterine cancer. The presence of mutations in these genes in the tissue sample can be determined by any suitable method, such as, for example, Sanger sequencing of the tissue sample or next generation sequencing of the tissue sample, PCR-based methods including ARMS-based PCR, FISH, or other suitable detection technique.

[0069] In some embodiments, the absence of expression of BRG1, BAF180, or BAF170 in a sample of tissue obtained from an endometriotic lesion of a subject indicates a risk of malignant progression or transformation of the endometriotic lesion to cancers such as CCC, EC or uterine cancer. The expression level of BRG1, BAF180 or BAF170 in the tissue sample may be determined in any suitable manner, including for example immunohistochemistry.

[0070] In some embodiments, the presence of mutations in one or more genes that encode components of the SWI/SNF complex that disrupt the function or expression of the corresponding protein products in a sample of tissue obtained from a cancerous lesion of a subject indicates a poor prognosis for the subject. The presence of mutations in such genes can be determined by any suitable method, such as, for example, Sanger sequencing of the tissue sample or next generation sequencing of the tissue sample, PCR-based methods including ARMS-based PCR, or TaqMan™ assays, or hybridization-based methods including FISH, or any other suitable detection technique. In some embodiments, the one or more genes are ARID1B, ARID2, SMARCA2, SMARCC1, SMARCD1, SMARCD2, SMARCD3, SMARCE1, ACTL6A, ACTL6B, or SCMARCB1.

[0071] In some embodiments, the absence of expression of one or more proteins that are components of the SWI/SNF complex in a sample of tissue obtained from a cancerous lesion of a subject indicates a poor prognosis for the subject. The expression level of the proteins in the tissue sample may be determined in any suitable manner, including for example immunohistochemistry. In some embodiments, the proteins are BAF250b, BAF200, BRM, BAF155, BAF60a, BAF60b, BAF60c, BAF57, BAF53a, BAF53b, or BAF47.

[0072] In some embodiments, the presence of mutations in ARID1A, a gene encoding the protein BAF250a, that disrupt the function or expression of BAF250a in a sample of tissue obtained from a CCC, EC or uterine cancer of a subject indicates a poor prognosis for the subject. The presence of mutations in ARID1A in the tissue sample can be determined by any suitable method, such as, for example, Sanger sequencing of the tissue sample or next generation sequencing of the tissue sample, PCR-based methods including ARMS-based PCR, or TaqMan™ assays, or hybridization-based methods including FISH, or any other suitable detection technique.

[0073] Those skilled in the art will recognize that a number of methods or techniques for identifying products such as ARMS-PCR products may be used in order to detect the presence of mutations in ARID1A or other genes encoding proteins that are components of the SWI/SNF complex. For example, embodiments include, but are not limited to, techniques such as primer extension, classical microarrays or line probes. Methods of PCR product endpoint detection including, but not limited to, fluorescence, chemiluminescence, colourimetric techniques or measurement of redox potential may also be used with the embodiments described herein for detecting gene mutations.

[0074] In some embodiments, the mutations in ARID1A that indicate a poor prognosis include the mutations in SEQ ID NO.:2 through SEQ ID NO.:122, set forth in FIG. 4.

[0075] In some embodiments, the absence of expression of BAF250a in a sample of tissue obtained from a CCC, EC or uterine cancer of a subject indicates a poor prognosis. The expression level of BAF250a in the tissue sample may be determined in any suitable manner, including for example immunohistochemistry.

[0076] In some embodiments, the mutations in BAF250a that indicate a poor prognosis include the mutations set forth in FIG. 4.

[0077] In some embodiments, the presence of mutations in SMARCA4, PBRM1, or SMARCC2 that disrupts the function or expression of BRG1, BAF180, or BAF170, respectively, in a sample of tissue obtained from a CCC, EC or uterine cancer of a subject indicates a poor prognosis. The presence of mutations in these genes in the tissue sample can be determined by any suitable method, such as, for example, Sanger sequencing of the tissue sample or next generation sequencing of the tissue sample, PCR-based methods including ARMS-based PCR, FISH, or other suitable detection technique.

[0078] In some embodiments, the absence of expression of BRG1, BAF180, or BAF170 in a sample of tissue obtained from a CCC, EC or uterine cancer of a subject indicates a poor prognosis. The expression level of BRG1, BAF180 or BAF170 in the tissue sample may be determined in any suitable manner, including for example immunohistochemistry.

[0079] In some embodiments, the presence of mutations in one or more genes that encode components of the SWI/SNF complex that disrupt the function or expression of the corresponding protein products in a sample of tissue obtained from a cancerous lesion of a subject indicates a low likelihood that treatment of the subject with standard chemotherapeutic agents such as platinum and taxane therapies is likely to be successful. The presence of mutations in such genes can be determined by any suitable method, such as, for example, Sanger sequencing of the tissue sample or next generation sequencing of the tissue sample. In some embodiments, the one or more genes are ARID1B, ARID2, SMARCA2, SMARCC1, SMARCD1, SMARCD2, SMARCD3, SMARCE1, ACTL6A, ACTL6B, or SCMARCB1.

[0080] In some embodiments, the absence of expression of one or more proteins that are components of the SWI/SNF complex in a sample of tissue obtained from a cancerous lesion of a subject indicates a low likelihood that treatment of the subject with standard chemotherapeutic agents such as platinum and taxane therapies is likely to be successful. The expression level of the proteins in the tissue sample may be determined in any suitable manner, including for example immunohistochemistry. In some embodiments, the proteins are BAF250b, BAF200, BRM, BAF155, BAF60a, BAF60b, BAF60c, BAF57, BAF53a, BAF53b, or BAF47.

[0081] In some embodiments, the presence of mutations in ARID1A, a gene encoding the protein BAF250a, that disrupt the function or expression of BAF250a in a sample of tissue obtained from a CCC, EC, or uterine cancer of a subject indicates a low likelihood that treatment of the subject with standard chemotherapeutic agents such as platinum and taxane therapies is likely to be successful. The presence of mutations in ARID1A in the tissue sample can be determined by any suitable method, such as, for example, Sanger sequencing of the tissue sample or next generation sequencing of the tissue sample, PCR-based methods including ARMS-based PCR, or TaqMan™ assays, or hybridization-based methods including FISH, or any other suitable detection technique.

[0082] In some embodiments, the mutations in ARID1A that indicate a low likelihood that treatment of the subject with standard chemotherapeutic agents such as platinum and taxane therapies is likely to be successful include the mutations in SEQ ID NO.:2 through SEQ ID NO.:122 set forth in FIG. 4.

[0083] In some embodiments, the absence of expression of BAF250a in a sample of tissue obtained from a CCC, EC, or uterine cancer of a subject indicates a low likelihood that treatment of the subject with standard chemotherapeutic agents such as platinum and taxane therapies is likely to be successful. The expression level of BAF250a in the tissue sample may be determined in any suitable manner, including for example immunohistochemistry.

[0084] In some embodiments, the mutations in BAF250a that indicate a low likelihood that treatment of the subject with standard chemotherapeutic agents such as platinum and taxane therapies is likely to be successful include the mutations set forth in FIG. 4.

[0085] In some embodiments, the presence of mutations in SMARCA4, PBRM1, or SMARCC2 that disrupts the function or expression of BRG1, BAF180, or BAF170, respectively, in a sample of tissue obtained from a CCC, EC, or uterine cancer of a subject indicates a low likelihood that treatment of the subject with standard chemotherapeutic agents such as platinum and taxane therapies is likely to be successful. The presence of mutations in these genes in the tissue sample can be determined by any suitable method, such as, for example, Sanger sequencing of the tissue sample or next generation sequencing of the tissue sample, PCR-based methods including ARMS-based PCR, or TaqMan™ assays, or hybridization-based methods including FISH, or any other suitable detection technique.

[0086] In some embodiments, the absence of expression of BRG1, BAF180, or BAF170 in a sample of tissue obtained from a CCC, EC, or uterine cancer of a subject indicates a low likelihood that treatment of the subject with standard chemotherapeutic agents such as platinum and taxane therapies is likely to be successful. The expression level of BRG1, BAF180, or BAF170 in the tissue sample may be determined in any suitable manner, including for example immunohistochemistry.

[0087] In some embodiments, loss of expression or function of BAF250a is a biomarker for malignancy derived from endometrial epithelium. In some embodiments, ARID1A mutation or BAF250a loss is a targetable feature of a cancer. In some embodiments, the cancer is CCC, EC, or uterine cancer.

[0088] In some embodiments, mutations in one or more of the genes that encode proteins that are components of the SWI/SNF complex that disrupt the function of the corresponding protein in the SWI/SNF complex may be used in a screen to identify therapeutic targets for treatment of CCC, EC, and/or uterine carcinoma. In some embodiments, mutations in one or more proteins that are components of the SWI/SNF complex that disrupt the function of that protein in the SWI/SNF complex may be used in a screen to identify therapeutic targets for the treatment of CCC, EC, and/or uterine carcinoma.

[0089] The screen used to identify the therapeutic targets may be a synthetic lethal screen. Any suitable cell line that does not express one or more of the SWI/SNF component proteins, expresses one or more of the SWI/SNF component proteins at levels that are too low to maintain proper functioning of the SWI/SNF complex, or a mutant form of one or more of the SWI/SNF component proteins that does not allow proper functioning of the SWI/SNF complex to be maintained, may be used.

[0090] In some embodiments, the screen may be conducted using 867CL, 867CL-ARID1A-ΔL2007, and 867CL-ARID1A-WT cells. In some embodiments, the screen may be conducted using an isogenic knockout of ARID1A in HCT116 cells.

[0091] In some embodiments, the synthetic lethal screen may use the Hannon/Elledge lenti-shRNA human library. In some embodiments, the synthetic lethal screen may use the Dharmacon siGenome pool.

[0092] In some embodiments, at least one mutation used in the synthetic lethal screen is in the ARID1A gene. In some embodiments, the at least one mutation in the ARID1A gene is one of the mutations in SEQ ID NO.:2 through SEQ ID NO.:122. In some embodiments, the at least one mutation in the ARID1A gene is ARID1A-ΔL2007. In some embodiments, the at least one mutation in the ARID1A gene encodes a mutant form of the BAF250a protein. In some embodiments, the mutant form of the BAF250a protein is one of the mutations set forth in FIG. 4.

[0093] In some embodiments, at least one mutation used in the synthetic lethal screen is in one of the SMARCA4, PBRM1, or SMARCC2 genes. In some embodiments, the at least one mutation in the SMARCA4, PBRM1, or SMARCC2 genes is one of the mutations set forth in FIG. 5. In some embodiments, at least one mutation is in one of the BRG1, BAF180, or BAF170 proteins. In some embodiments, the at least one mutation in the BRG1, BAF180, or BAF170 proteins is one of the mutations set forth in FIG. 5.

[0094] In some embodiments, at least one mutation used in the synthetic lethal screen is in one of the ARID1B, ARID2, SMARCA2, SMARCC1, SMARCD1, SMARCD2, SMARCD3, SMARCE1, ACTL6A, ACTL6B, or SCMARCB1 genes. In some embodiments, at least one mutation is in one of the BAF250b, BAF200, BRM, BAF155, BAF60a, BAF60b, BAF60c, BAF57, BAF53a, BAF53b, or BAF47 proteins.

[0095] In some embodiments, therapeutic agents are developed to inhibit the activity of one or more targets identified by the synthetic lethal screen. In some embodiments, such therapeutic agents are used to treat cancers such as CCC, EC, or uterine cancer. In some embodiments, treatment involves administering a therapeutically effective amount of the therapeutic agent to the subject in need. Potential therapeutic agents that may be screened against the one or more targets include known drugs, small molecules, natural compounds, chemical libraries, and siRNA.

[0096] In some embodiments, reagents for assaying for the presence of a mutation in a gene encoding a protein that forms part of the SWI/SNF complex, including ARID1A, or for assaying for expression of a protein that forms part of the SWI/SNF complex, including BAF250a, may be provided in the form of a kit.

[0097] Embodiments of the invention are further illustrated with reference to the following examples, which are intended to be illustrative and not limiting.

### EXAMPLES

### Example 1.0

### Identification of ARID1A Mutations in Ovarian Carcinomas

[0098] Because CCC are genomically stable^{8,9}, it was expected they will have a constricted mutational landscape and recurrent mutations which would be evident from the analysis of a small number of cases.²⁴

[0099] The inventors decoded the transcriptomes of 17 ovarian clear cell cancers using RNA-seq. Gene fusions and small interstitial deletions and insertions were detected by methods described in recent publications^{25,33,34} and SNVs were detected using SNVmix, a Bayesian mixture based algorithm recently published³⁵. The vast majority of SNVs were expected to be rare germline variants as opposed to somatic mutations. Therefore the inventors used the same approach that resulted in identification of the FOXL2 mutation in granulosa cell tumours¹ to identify genes recurrently mutated in CCCs, but not in unrelated cancer types. The inventors identified mutations in the ARID1A gene in six of seventeen CCCs: three cases had nonsense mutations, a fourth case had a 6018-6020delGCT (2007ΔL) 3 base pair deletion mutation, a fifth case had both a somatic missense mutation (T5953C(S1985P)) and a single nucleotide insertion in exon 20 (5541insG), and a sixth case had a genomic deletion spanning intron one resulting in loss of the region 3′ to exon 1 in ARID1A and fusion to the neighbouring gene (ZDHHC18); this was validated by fluorescent in situ hybridization (FISH) (FIGS. 2 and 3).

[0100] All ARID1A point mutations were validated by Sanger sequencing, and in all cases where germline DNA was available, mutations were determined to be somatic. Loss of heterozygosity (LOH) was detected in CCC01 which had the 6018-6020delGCT mutation.

[0101] The ARID1A gene was analysed in an additional case of CCC arising in an endometriotic cyst (CCC23) using Sanger sequencing, as this case was not included in the RNA-seq experiments. This resulted in identification of a truncating mutation (G6139T (E2047*)). This case also exhibited LOH through loss of one copy of chromosome 1. Thus, somatic mutations in the ARID1A gene were found in seven of eighteen clear cell cancers studied. By comparison, no ARID1A mutations were seen in the transcriptomes of 50 triple negative breast cancers, 6 endometrioid, or 6 high grade serous cancers (p=0.00003). A truncating ARID1A mutation was found in one of the two mucinous carcinomas of the ovary studied.

[0102] With reference to FIG. 2, the location of mutations identified by the inventors is shown. BAF250a has a DNA binding or ARID domain (AT-rich interactive domain) of approximately 100 amino acids, and multiple LXXLL (where L is leucine and X is any amino acid) motifs which potentially interact with nuclear hormone receptors. The 20 exons of ARID1A are shown (numbered boxes) above a schematic of the BAF250a protein. In BAF250a, the ARID DNA binding domain (“ARID”), and HIC1 binding domain (“hypermethylated in cancer 1”) (“HIC1”) are shown. Four LXXLL motifs are indicated and the three C-terminal LXXLL motifs facilitate interaction with glucocorticoid receptor. The nucleotide mutations (with corresponding amino acid mutations in parentheses) listed above the schematic are those identified by means of transcriptome sequencing (RNA sequencing) of the 18 samples of ovarian CCC and the TOV21G cell line. Mutations listed below the schematic are those identified with the use of targeted exon resequencing and Sanger sequencing of genomic DNA from 210 ovarian cancer samples (described below, results shown in FIG. 4). All unique somatic mutations detected in samples of ovarian clear-cell carcinoma, endometrioid carcinoma, and high-grade serous carcinoma are shown.

[0103] The foregoing results provide strong genetic evidence that ARID1A, a gene implicated as a tumour suppressor through functional studies, is frequently disrupted in CCCs.

### Example 2.0

### Identification of Other SWI/SNF Genes Mutated in Ovarian Carcinomas

[0104] The inventors have detected SNVs in other SWI/SNF genes including a missense mutation in SMARCA4 (encodes for BRG1) and a missense mutation in PBRM1 (encodes BAF180) in ARID1A-mutation-negative CCCs (FIG. 5). As mutations in ARID1A or other SWI/SNF coding genes were found in 9 of 18 (50%) CCCs, these events are important to the development of this cancer. By contrast, mutations in TP53, BRAF, PIK3CA and PTEN were seen in only one, two, two, and three CCCs respectively. This fraction of cases was expected to carry these mutations based on data from previous publications¹⁵.

[0105] With reference to FIG. 1, the components of the SWI/SNF complex in which mutations were detected are highlighted. All 15 genes encoding protein components of the SWI/SNF complex are shown in the table at left. An example of a BAF250a-containing SWI/SNF complex is shown at right. The arrow indicates that either BAF250a or BAF250b may be in the complex. The PBAF SWI/SNF complex (not shown) has BRG1 and contains BAF200 and BAF180 instead of BAF250a/b. BAF250a encoded by ARID1A is implicated in CCCs based on the inventors' mutational data and is shown in orange. Other SWI/SNF genes where the inventors found mutations (SMARCA4, PBRM1, SMARCC2) are underlined in the box at left and corresponding proteins are underlined in the cartoon at right (except in the case of BAF180 which is not present in the illustrated complex). Constant core components of the complex are indicated in blue. The ATPase is shown in green.

[0106] In addition to variants in ARID1A, CTNNB1 (C110G (S37C), NM_{—}001904.3, SEQ ID NO.:125) somatic mutations were detected in CCC02 and CCC03 and validated by PCR amplification and Sanger sequencing in both tumor and germline DNA from these cases. Additionally, two variants were predicted based on RNA sequencing data in the TOV21G cell line in PIK3CA (C3139T (H1047Y), NM_{—}006218.2, SEQ ID NO.: 123) and KRAS (G37T (G13C), NM_{—}004985.3, SEQ ID NO. 124) which were validated by PCR amplification and Sanger sequencing. Though variants in BRAF were observed in the RNA sequencing data, none of these passed validation by Sanger sequencing in tumor DNA.

### Example 3.0

### Mutations in ARID1A are Associated with Loss of Expression of BAF250a

[0107] To demonstrate that ARID1A mutations are associated with loss of expression, the inventors used a mouse monoclonal antibody (Abgent, Inc.) targeting the central region of the BAF250a protein. The antibody stained all normal nuclei strongly. Of the 18 clear cell cancer samples analysed by RNA-seq in Example 1.0, eight showed loss of BAF250a expression. Of these eight cases, five had ARID1A mutations (FIG. 3). Interestingly, in the other three cases negative for immunohistochemical BAF250a staining, ARID1A mutations were not detected by RNA-seq, suggesting that there may be other genetic or epigenetic mechanisms for loss of BAF250a expression. Two cases with ARID1A mutations expressed BAF250a; one of these contained an inframe deletion of a single amino acid (6018-6020delGCT (ΔL2007) in CCC01) in exon 20 and the second contained an SNV that created a premature STOP codon (C4201T (Q1401*) in CCC06 in exon 18. The BAF250a expressed in CCC06 may be a truncated protein.

[0108] To demonstrate that loss of BAF250a is a subtype-specific finding in ovarian cancer, the inventors stained 300 tumours from their ovarian tumour bank. All non tumour nuclei were strongly positive for BAF250a whereas 11 of 27 CCC cases (40%) showed complete loss of BAF250a in all tumour cells. By comparison, 17 of 180 (10%) high grade serous cancers (p<0.0001) showed BAF250a loss.

### Example 4.0

### ARID1A Mutation Provides Evidence of Risk of Transformation or Progression of Endometriosis

[0109] To demonstrate whether ARID1A mutations and loss of BAF250a expression are early events in ovarian carcinogenesis, the inventors studied tumour and adjoining endometriosis from case CCC23 which has a truncating mutation in exon 20 and LOH accompanied by complete loss of BAF250a expression (FIG. 6). The epithelium but not the stroma of the endometriosis showed loss of BAF250a expression. FISH analysis showed that the endometriosis has LOH at the ARID1A locus in a small fraction of cells. Sanger sequencing of cloned PCR products also revealed the mutation in endometriotic epithelial cells. This is the first cancer specific mutation described in endometriosis and suggests that ARID1A may play a role in the transformation of endometriosis into cancer.

[0110] FIG. 6 shows BAF250a expression, ARID1A mutations, and loss of heterozygosity in CCC23 and corresponding endometriotic precursor lesions. Panel (A) shows a high magnification view of negative nuclear BAF250a immunostaining from in the endometrial lining of the endometriotic cyst (left) and the clear cell carcinoma arising from the endometrium (right). Normal tissue adjacent to endometriosis is positive for BAF250a expression (arrows) Immunostaining for BAF250a was done with Abgent mouse monoclonal antibody (cat #AT1188a, clone 3112) diluted 1:25 and run on Ventana Discovery XT with detection by anti-mouse HRP secondary antibody. Panel (B) shows a section of the wall of the endometriotic lesion with area of interest for laser capture microdissection highlighted (red square). Cancerous tissue is indicated by arrowhead (top). Isolated strips of endometrial cells after removal by laser capture microdissection (bottom). Panel (C) shows fluorescent in situ hybridization (FISH) analysis of CCC23 tumour (top) which suggests that only a single copy of the ARID1A gene is present (arrows), thus there is loss of heterozygosity at the unmutated allele. The red 5′ probe (RP11-35M8) was 158,905 by in length and hybridizes approximately 200 kb upstream of ARID1A. The green 3′ probe (RP11-2851113) was 183,012 by in length and hybridizes approximately 130 kb downstream of ARID1A. FISH analysis of endometriosis corresponding to CC23 (bottom) shows a mixture of normal cells with (cell at top left) and cells with loss of heterozygosity at the ARID1A locus (middle and far right cells). Labelling was done using probes flanking ARID1A (white arrows) as described along with CEP1 (orange) Vysis centromeric probe (indicated by yellow arrows). Cells with loss of heterozygosity retain two centromeres but have only one copy of the ARID1A locus. Panel (D) shows results of Sanger sequencing from CCC23. Mutation (G6139T) and corresponding position in normal tissue is indicated by arrow in tumour, normal, and endometriosis derived samples respectively. Endometriosis sequencing was done using laser microdissection followed by cloning of PCR amplified ARID1A into E. coli. 48 colonies were sequenced and the mutation was detected in 2 colonies.

[0111] As part of the inventors' tumour banking procedures, they have developed a xenograft sub-renal capsule technique to generate ovarian cancer models in NOD/SCID mice with a greater than 90% rate of successful engraftment to date³⁶. Transplantable xenografts have been established from five clear cell cancers including case VOA867 (CCC 14) which has a truncating mutation (C1680A/G, Y560X) accompanied by complete absence of BAF250a protein (FIG. 7).

[0112] FIG. 7 shows the data from case VOA867 (CCC14). Panel (A) shows results from Sanger sequencing of ARID1A from tumour and matched normal DNA. Location of mutation (C1680A) is indicated by arrow. Tumour DNA trace suggests heterozygosity. Panel (B) shows sequence logo from RNA-seq of VOA867 (CCC 14) demonstrating that wildtype and mutant alleles are expressed at approximately equivalent frequencies. Mutation (C1680A) is indicated by arrow. Panel (C) shows immunohistochemical staining of BAF250a in VOA867 (CCC14). These results shows lack of expression (left). A non-Hodgkin's lymphoma with positive BAF250a expression is shown at right for comparison. Immunostaining for BAF250a was done using with Abgent mouse monoclonal antibody (cat #AT1188a, clone 3112) diluted 1:25 and run on Ventana Discovery XT with detection by anti-mouse HRP secondary antibody.

### Example 5.0

### Knock Down of Expression of BAF250a in HCT116 Cells

[0113] The inventors have also effectively knocked down expression of BAF250a through expression of ARID1A-shRNAmir-GFP in HCT116 cells (FIG. 8). FIG. 8 shows immunofluorescence data demonstrating knockdown of BAF250a expression through stable expression ARID1A shRNA in HCT 116 cells. shRNAmir-GFP lentiviral vectors targeting human ARID1A sequence (green) (Open Biosystems—shRNA, V2LHS-72862) was packaged and transduced into the human HCT116 colon carcinoma cell line according to the manufacturer's instructions. Well transduced cells with efficient GFP expression show a marked knock down of ARID1A (no BAF250a (red) expression) while the non-transduced cells which lack GFP expression stained positive for BAF250a (in red).

### Example 6.0

### Further Confirmation of The Role of ARID1A in CCC

[0114] Based on the results from sequencing the whole transcriptomes of 18 CCCs and a CCC cell line discussed above in Example 1.0, the inventors sequenced ARID1A in an additional 210 ovarian carcinomas and a second ovarian CCC cell line. In 2 CCCs, the inventors sequenced DNA from microdissected contiguous atypical endometriotic epithelium to determine whether ARID1A mutations were present. The inventors measured BAF250a expression by means of immunohistochemical analysis in an additional 455 ovarian carcinomas.

### Example 6.1

### Materials and Methods

### Example 6.1.1

### Patients and Samples

[0115] Eighteen ovarian CCC from the OvCaRe (Ovarian Cancer Research) frozen tumor bank and one CCC cell line (TOV21G) were selected for whole-transcriptome paired-end RNA sequencing. Patients provided written informed consent for research using these tumor samples before undergoing surgery, including acknowledgement that a loss of confidentiality could occur through the use of samples for research. Separate approval from the hospital's institutional review board was obtained to permit the use of these samples for RNA-sequencing experiments.

[0116] To evaluate the frequency of ARID1A mutations in CCC and other ovarian cancer subtypes, the inventors used Illumina based targeted exon resequencing to interrogate the DNA sequence of a mutation validation cohort of 101 CCC (in addition to the 19 cases for RNA seq, described above (the “discovery cohort”)), 33 EC, 76 HGS carcinomas and the CCC derived cell line ES2. 10 CCC came from Johns Hopkins University (JHU), 29 from the Université de Montreal (UdeM) and 42 from the Australian Ovarian Cancer Study (AOCS); all other cancers were obtained from the OvCaRe frozen tumor bank. For 70 cases with predicted mutations germline DNA was available. All patients had consented to have their tumors and germline DNA used for research including genomic studies. From the cohort of 119 CCCs (both discovery cohort and mutation validation cohort) and 33 ECs (mutation validation cohort), 86 CCCs and all 33 ECs were examined to determine if endometriosis was present at the time of surgery. These results are shown in FIG. 9.

[0117] DNA and RNA were extracted using standard methodologies. In cases for which insufficient DNA for ARID1A resequencing was available whole genome amplification (WGA) was used to extend the DNA template, however mutations were all confirmed using non-WGA treated DNA.

### Example 6.1.2

### Pathological Review

[0118] All tumor samples were independently reviewed by a gynecologic pathologist before mutational analysis. In cases in which the review diagnosis differed from the source diagnosis, the samples were further reviewed by another gynecologic pathologist, who acted as an arbiter. Both review pathologists were unaware of the results of genomic studies.

### Example 6.1.3

### Paired-End RNA Sequencing and Analysis (Whole Transcriptome Sequencing)

[0119] Whole transcriptome sequencing was performed as previously described^{1,35}. Double stranded cDNA was synthesized from polyadenylated RNA, and the resulting cDNA was sheared. The 190-210 bp DNA fraction was isolated and PCR amplified to generate the sequencing library, as per the Illumina Genome Analyzer paired end library protocol (Illumina Inc., Hayward, Calif.). The resulting libraries were sequenced on an Illumina GAᵢᵢ. Short read sequences obtained from the Illumina GAᵢᵢ were mapped to the reference human genome (NBCI build 36.1, hg18) plus a database of known exon junctions 2 using MAQ 3 in paired end mode.

[0120] Single nucleotide variants were predicted using a Bayesian mixture model, SNVmix^{1,35}. Only bases with >Q20 base quality were considered to minimize errors. SNVs were cross-referenced against dbSNP version 129 and published genomes in order to eliminate any previously described germline variants¹.

[0121] Gene fusions were predicted using deFuse. deFuse predicts gene fusions by searching paired end RNA-sequencing data for reads that harbor fusion boundaries. Spanning reads harbor a fusion boundary in the unsequenced region in the middle of the read, whereas split reads harbor a fusion boundary in the sequence of one end. deFuse searches for spanning reads with reads ends that align to different genes. Approximate fusion boundaries implied by spanning reads are then resolved to nucleotide level using dynamic programming based alignment of candidate split reads.

### Example 6.1.4

### Copy Number Analysis of Affymetrix SNP 6.0 Arrays

[0122] The Affymetrix SNP 6.0 arrays were normalized using CRMAv2³⁷ using the default settings for performing allelic-crosstalk calibration, probe sequence effects normalization, probe-level summarization, and PCR fragment length normalization. Log ratios were then computed by normalizing against a reference generated using a normal dataset of 270 HapMap samples obtained from Affymetrix. Segmentation is performed using an 11-state hidden Markov model. This approach simultaneously detects and discriminates somatic and germline DNA copy number changes in cancer genomes. The hidden Markov model performs segmentation of the log ratio intensity data and predicts discrete copy number status for each resulting segment from the set of five somatic states (homozygous deletion, hemizygous deletion, gain, amplification, and high-level amplification), five analogous germline states, and neutral copy number. The boundaries of the segments provide candidate breakpoints in the genome as a result of copy number alteration events.

[0123] In all cases with Affymetrix SNP 6.0 data, only CCC04 contained a breakpoint in ARID1A. The segment (chr1:26898389-27000523) is a homozygous deletion that breaks the gene near the 5′ end and truncates it. The published CNV map from 450 HapMap individuals³⁸ was studied to see whether any regions overlapping ARID1A were reported and none were found. Based on this, it is predicted that this is a somatic change.

### Example 6.1.5

### Illumina-Based Targeted Exon Resequencing of ARID1A

[0124] Genomic DNA for the cases described under Patients and Samples above was subjected to Illumina based targeted exon resequencing. Briefly, all ARID1A exons were PCR amplified and individual amplicons were indexed, pooled, and sequenced. Individual indexes enabled the deconvolution of reads deriving from individual samples concurrently sequenced from the same library. Validation by Sanger sequencing was performed for all potential truncating or missense mutations with a Grantham index for amino acid change of greater than X, present above a 10% mutant allele frequency cut-off. Insufficient usable data was obtained from exon 1; this was sequenced by Sanger sequencing in all cases using four overlapping amplicons.

[0125] Automated primer design was performed using Primer3³⁹ and custom scripting. Primers were designed to span annotated exons of ARID1A (UCSC build hg18) with an average PCR product size of 2067 bp. Primers were synthesized by Integrated DNA Technologies at a 25 nmol scale with standard desalting (IDT Coralville, Iowa) and tested in PCR using control human genomic DNA. Primer pairs that failed to generate a product of the expected size were redesigned. The sequences for the primers are provided in FIG. 10. Polymerase cycling reactions were set up in 96-well plates and comprised of 0.5 μM forward primer, 0.5 μM reverse primer, 1 ng of gDNA template or 1 ng of gDNA that was whole genome amplified using the REPLI-g® Mini/Midi (QIAGEN, Valencia, Calif.), 5× Phusion HF Buffer, 0.2 μM dNTPs, 3% DMSO, and 0.4 units of Phusion DNA polymerase (NEB, Ipswich, Mass., USA). Reaction plates were cycled on a MJR Peltier Thermocycler (model PTC-225) with cycling conditions of a denaturation step at 98° C. for 30 sec, followed by 35 cycles of [98° C. for 10 sec, 69° C. for 15 sec, 72° C. for 15 sec] and a final extension step at 72° C. for 10 min PCR reactions were visualized by SybrGreen (Life Technologies, Carlsbad, Calif., USA) in 1.2% agarose (SeaKem LE, Cambrex, N.J., USA) gels run for 90 min at 170V to assess PCR success. Reactions were pooled (4 μl per well) by template and sheared to an average size of 200 bp using a Covaris E210 ultrasonic 96 well sonication platform (75 seconds, duty cycle 20, intensity 5, cycles/burst 200; Covaris Inc. Woburn, Mass.) and subjected to plate based library construction on a BioMek FX Laboratory Automation Workstation (Beckman Coulter, Brea, Calif.) using a modified paired-end protocol (Illumina, Hayward, Calif.). This involved end-repair and A-tailing of sheared amplicons followed by ligation to Illumina PE adapters and PCR amplification. At each step in the process, reactions were purified using solid phase reversible immobilization paramagnetic beads (Agencourt AMPure, Beckman Coulter, Brea, Calif.) in 96 well plates on the BioMek FX platform using custom in house programs. Purified adapter-ligated amplicons were PCR-amplified using Phusion DNA polymerase (NEB, Ipswich, Mass.) in 10 cycles using PE primer 1.0 (Illumina) and a custom multiplexing PCR Primer [5′CAAGCAGAAGACGGCATACGAGATNNNNNNCGGTCTCGGCATTCCTGCTGA ACCGCTCTTCCGATCT-3′] where “NNNNNN” was replaced with 96 unique fault tolerant hexamer barcodes. Individual amplicons were indexed and pooled by plate and the 200-400 bp size range purified away from adapter ligation artifacts on an 8% Novex TBE PAGE gel (Invitrogen, Carlsbad, Calif., USA). Individual indexes enabled the deconvolution of reads deriving from individual samples concurrently sequenced from the same library. DNA quality was assessed and quantified using an Agilent DNA 1000 series II assay (Agilent, Santa Clara Calif.) and Nanodrop 7500 spectrophotometer (Nanodrop, Wilmington, Del.) and subsequently diluted to 10 nM. The final concentration was confirmed using a Quant-iT dsDNA HS assay kit and Qubit fluorometer (Invitrogen, Carlsbad, Calif.). For sequencing, clusters were generated on the Illumina cluster station using v4 cluster reagents and paired-end 75 bp reads generated using v4 sequencing reagents on the Illumina GAiix platform following the manufacturer's instructions. Between the paired 75 bp reads a third 7 base pair read was performed using the following custom sequencing primer [5′-GATCGGAAGAGCGGTTCAGCAGGAATGCCGAGACCG] to sequence the hexamer barcode. Image analysis, base-calling and error calibration was performed using v1.60 of Illumina's Genome analysis pipeline.

### Example 6.1.6

### Data Processing for ARID1A Illumina-based Targeted Exon Resequencing

[0126] Sequence reads from the ARID1A targeted exon resequencing experiment were aligned to the genomic regions targeted by the PCR primers using MAQ version 0.7.1. Each exon was assessed for coverage by enumerating all uniquely aligning reads to the targeted space. SNVs were determined by computing the allelic counts for each genomic position within the complete targeted space. All positions exhibiting an allelic ratio of at least 10% variant were considered for validation by Sanger sequencing. Insertions and deletions were predicted using the Maq indelpe program using 10% allelic ratio criteria for selection for experimental follow up. In addition, to determine a confidence measure for each SNV prediction, we applied a one-tailed Binomial exact test to each position covered as described in Shah et al.¹ using all aligned reads to compute the expected distribution. Benjamini-Hochberg⁴⁰ correction for multiple comparison was applied to the resultant Binomial-test p-values to yield q-values for each position.

### Example 6.1.7

### Sanger Sequencing of ARID1A Exon1

[0127] The Illumina based targeted exon sequencing of ARID1A did not provide coverage of exon 1. To obtain sequence information for exon 1, four overlapping PCR primer sets were designed, priming sites for M13 forward and M13 reverse added to their 5′ ends to allow direct Sanger sequencing of amplicons. For the PCR, after denaturation at 94° C. for 1 min, DNA was amplified over 35 cycles (94° C. 30 sec, 58-60° C. 30sec, 72° C. 30 sec) using an MJ Research Tetrad (Ramsey, Minn.). Final extension was at 72° C. for 5 min PCR products were purified using ExoSAP-IT® (USB® Products Affymetrix, Inc., Cleveland, Ohio) and sequenced using an ABI BigDye terminator v3.1 cycle sequencing kit (Applied Biosystems, Foster City, Calif.) and an ABI Prism 3130x1 Genetic Analyzer (Applied Biosystems, Foster City, Calif.). All capillary traces were visually inspected to confirm their presence in tumor and absence from germline traces or analyzed using Mutation Surveyor.

### Example 6.1.8

### Sanger Sequence Validation of Predicted Mutations

[0128] Based on the exon resequencing data, any truncating or radical missense mutations (results in change to the charge or polarity of the amino acid') that occurred at an allele frequency of greater than 10% were further validated in tumor DNA, and in most cases germline DNA, using Sanger sequencing. Regions of ARID1A containing putative mutations were PCR amplified from genomic DNA using primers with priming sites for M13 forward and M13 reverse added to their 5′ ends to allow direct Sanger sequencing of amplicons. In cases where the matched germline DNA of the patient was from FFPE material, short (<250 nt) amplicons were designed to validate the SNVs.

[0129] Unless otherwise stated, amplicons were produced from genomic DNA from both the tumor and matched germline DNA from the same patient. For the PCR, after denaturation at 94° C. for 1 min, DNA was amplified over 35 cycles (94° C. 30 sec, 60-65° C. 30sec, 72° C. 30 sec) using an MJ Research (Ramsey, Minn.) Tetrad. Final extension was at 72° C. for 5 min PCR products were purified using a MinElute PCR purification kit (QIAGEN, Valencia Calif.) and sequenced using an ABI BigDye terminator v3.1 cycle sequencing kit (Applied Biosystems, Foster City, Calif.) and an ABI Prism 3130×1 Genetic Analyzer (Applied Biosystems, Foster City, Calif.). All capillary traces were visually inspected to confirm their presence in tumor and absence from germline traces or analyzed using Mutation Surveyor. Results from this analysis along with immunohistochemistry are summarized in FIG. 4.

### Example 6.1.9

### Immunohistochemical Analysis of BAF250a Protein

[0130] Immunohistochemical (IHC) staining for BAF250a was performed in all cases with the exception of the 42 CCC from the AOCS and 4 samples from JHU. Additional IHC staining for hepatocyte nuclear factor (HNF)-1β, and estrogen receptor (ER) was performed on whole sections for two cases with associated atypical endometriosis as previously described¹⁴. ER is typically positive in endometriosis and negative in CCC, while HNF-1β is typically negative in endometriosis and positive in CCC¹⁴.

[0131] Immunohistochemical analysis was performed on 4μm thick paraffin sections on the semi-automated Ventana Discovery® XT instrument (Ventana Medical Systems, Tucson, Ariz.). ARID1A and HNF-1β was stained using the Ventana ChromoMap™ DAB kit. Antigen retrieval was standard CC1 with a two hour primary incubation. ARID 1A mouse clone 3H2 (Abgent, San Diego, Calif.) was applied at 1:25 followed by a 16 minute secondary incubation of pre-diluted UltraMap™ Mouse HRP (Ventana). HNF-1β goat polyclonal (Santa Cruz Biotechnology, Santa Cruz, Calif.) was applied at 1:200 dilution followed by a 32 minute incubation of unconjugated rabbit antigoat secondary at 1:500 (Jackson ImmunoResearch Labs Inc., West Grove, Pa.). Afterwards the tertiary antibody was incubated for 16 minutes with the prediluted Ventana UltraMap™ Rabbit HRP. ER immunostaining was done using the Ventana DABMap™ kit with standard CC1. The rabbit clone SP1 (Thermo Scientific, Fremont, Calif.) was incubated at 1:25 for 60 minutes with heat followed by a 32 minute secondary incubation with the pre-diluted Ventana Universal Secondary. Histologic images were obtained with the use of a ScanScope XT digital scanning system (Aperio Technologies Inc., Vista, Calif.).

### Example 6.1.10

### Immunohistochemical Analysis of BAF250A—Additional Experiment

[0132] A total of 455 additional ovarian-carcinoma samples—including 132 ovarian clear-cell carcinomas, 125 endometrioid carcinomas, and 198 high-grade serous carcinomas—from a previously described tissue microarray⁴ were used for an immunohistochemical validation cohort and were analyzed for BAF250a expression. All normal gynecologic tissues showed moderate or intense nuclear immunoreactivity for BAF250a. Tumors were scored positive for BAF250a if tumor cells showed definite nuclear staining and negative if tumor nuclei had no immunoreactivity but endothelial and other nontumor cells from the same samples showed immunoreactivity. Cases in which neither normal cells in the stroma nor tumor cells were immunoreactive were considered to be the result of technical failure. Additional immunohistochemical staining for hepatocyte nuclear factor 1β (HNF-1β) and estrogen receptor was performed on whole sections for two tumors with contiguous atypical endometriosis, as previously described.¹⁴

### Example 6.1.11

### Laser Capture Microdissection (LCM), DNA Isolation, and Cloning

[0133] In two cases with identified ARID1A mutations, atypical (adjacent) and distant endometriosis sections were identified by a gynecological pathologist. Laser capture microdissection was used to isolate endometriotic epithelium. DNA extracted from these cells was analyzed by sequencing for the mutations seen in each case. For microdissection, formalin-fixed paraffin embedded (FFPE) sections (5 μM) were cut on a Tissue-Tek® Cryo3® cryostat (Sakura Finetek, Dublin, Ohio) onto clean uncharged slides. FFPE sections were deparaffanized and rehydrated, stained with Arcturus® HistoGene® Staining Solution (Molecular Devices, Inc., Sunnyvale, Calif.), then dehydrated in alcohol and xylene. All reagents were prepared with nuclease-free water and all steps were performed using nuclease-free techniques.

[0134] Atypical or distant endometriotic cells were microdissected from prepared FFPE sections using the Veritas™ Laser Capture Microdissection System (Arcturus Bioscience, Inc., Mountain View, Calif.) according to the manufacturer's standard protocols. LCM caps with captured cells were placed directly in 15 μL of lysis buffer with 10 μL of Proteinase K, and DNA was isolated using the QIAamp® DNA Micro kit (QIAGEN, Hilden, Germany). DNA was subsequently quantified on a NanoDrop spectrophotometer (NanoDrop Technologies, Wilmington, Del.). PCR was performed, followed by gel extraction of PCR products using the QIAquick Gel Extraction Kit (QIAGEN), PCR products were cloned using the Topo® TA Cloning® Kit following manufacturer's instructions (Invitrogen Corp., Carlsbad, Calif.). Inserts from individual clones were PCR amplified and Sanger sequenced to determine mutation frequency.

### Example 6.1.12

### Fluorescent In-Situ Hybridization (FISH)

[0135] Tissue samples from CCC 13 and CCC23 were assayed for deletion of ARID1A using fluorescent in-situ hybridization (FISH). Six micrometer-thick sections were pre-treated as described previously.⁴² Three-color FISH assays were performed using BACs specific to the regions flanking ARID1A (RP11-35M8 (chr1:26,609,021-26,767,926) and RP11-285H13 (chr 1:27,033,759-27,216,771)) and fosmids specific to the ARID1A locus (G248P86703G10 (chr1:26,976,949-27,017,636), G248P89619A2 (chr1:26,954,143-26,991,761), and G248P88415D8 (chr1:26,914,023-26,954,284)). BAC and fosmid probes were obtained from British Columbia Genome Sciences Centre, and were directly labeled with Spectrum Red, Spectrum Blue, or Spectrum Green using a Nick Translation Kit (Abbott Molecular Laboratories, Abbott Park, Ill.). Analysis was done on a Zeiss Axioplan epifluorescent microscope. Images were captured using Metasystems Isis FISH imaging software (MetaSystems Group, Inc. Belmont Mass.). Loss of heterozygosity was confirmed in CCC23 and the results were inconclusive for CCC 13.

### Example 6.1.13

### Gene Expression Analysis

[0136] For gene expression analysis, the RNA-sequencing reads initially were mapped to the genome (NCBI36/hg 18) using MAQ (0.7.1). The inventors used the Sequence Alignment/Map (SAMtools 0.1.7) for downstream processing. Up to five mismatches was allowed. Raw expression values (read counts) were obtained by summing the number of reads that mapped to human genes based on the Ensembl database (Release 51). The initial gene expression values were normalized using a quantile normalization procedure using aroma.light (1.16.0.) package in R (2.11.1).

### Example 6.2

### Results

### Example 6.2.1

### ARID1A Mutations

[0137] Of the 19 RNAseq samples, 3 had somatic truncating mutations (C4201T (Q1401*), C5164T (R1722*), and C1680A (Y560*), where asterisks denote a stop codon), 2 had somatic indels (insertion-deletion: 6018-6020delGCT and 5541insG), one somatic missense mutation (T5953C (51989P), found in the same sample as the 5541insG mutation), and 1 had a gene rearrangement involving ARID1A and the neighbouring gene ZDHHC18 encoding the zinc-finger DHHC domain-containing protein 18 (FIGS. 2 and 3). The fusion ends of this rearrangement map to a homozygous deletion involving most of the ARID1A gene which is shown as FIG. 11. All predicted variants were validated by Sanger sequencing in DNA from the source tumors. As an exception, the deletion-rearrangement was validated with the use of microarray data (Affymetrix SNP 6.0). These mutations were all somatic.

[0138] Since mutations in PIK3CA (the phosphoinositide-3-kinase, catalytic, alpha polypeptide gene), CTNNB1 (the catenin beta-1 gene), KRAS (the v-Ki-ras2 Kirsten rat sarcoma viral oncogene homologue gene), and TP53 (the tumor protein p53 gene) are recurrent in ovarian clear-cell carcinoma,¹⁵ the inventors also analyzed the RNA-sequencing data and performed a polymerase-chain-reaction assay for the presence of variants in these genes (FIG. 3). Whole-transcriptome sequence data for the 19 samples of the discovery cohort have been deposited at the European Genome-Phenome Archive (accession number, EGAS00000000075).

[0139] ARID1A mutation frequency in CCC and other ovarian cancer subtypes was established through Illumina-based targeted exon resequencing of a larger cohort of samples. The total frequency of CCC with significant ARID1A mutations is 55/119, or 46%. Only two were somatic missense mutations; the remainder were truncating mutations that were evenly distributed across the coding sequence (FIG. 2). ARID1A mutations were also commonly seen in EC where 30% ( 10/33) had confirmed truncating mutations, and in none of the 76 HGS carcinoma with a somatic ARID1A missense mutation (mutations summarized in FIG. 4). Seventeen cases including 12 CCC and 5 EC each had two validated ARID1A mutations.

[0140] The inventors analyzed germ-line DNA from 55 samples (47 ovarian clear-cell carcinomas and 8 endometrioid carcinomas) in the discovery and mutation-validation cohorts for the presence of 65 truncating mutations (53 found in ovarian clear-cell carcinomas and 12 found in endometrioid carcinomas). In all 55, the mutations were found to be somatic. On this basis, the inventors made the assumption that 12 subsequent truncating mutations (10 in ovarian clear-cell carcinoma and 2 in endometrioid carcinoma) would be somatic (i.e., predicted to be somatic without germ-line DNA testing) (FIG. 4).

[0141] The presence of ARID1A mutation shows a strong association (Fisher Exact p<0.0001) with endometriosis associated ovarian cancer subtypes (CCC or EC) (FIG. 12).

### Example 6.2.2

### BAF250a Protein Expression

[0142] ARID1A was further evaluated by IHC staining for BAF250a in 73 CCC, 33 EC and 76 HGS cancers for which formalin-fixed, paraffin-embedded sections were available in the discovery cohort and the mutation-validation cohort. These results are summarized in FIG. 13. Loss of BAF250a expression is strongly associated with endometriosis-associated ovarian cancers. In one cohort, 35/74 (47%) of CCC and 7/33 (21%) of EC but only 1/76 (1%) of high grade serous cancers showed loss of BAF250a expression (Fisher Exact p=1.70E-10). The presence of truncating mutations in ARID1A was significantly associated with BAF250a loss in endometriosis-associated cancers (Fisher Exact p=3.38E-07). Within CCC 27/55 (49%) of cases with truncating mutations showed loss as opposed to 8/35 (23) % of mutation negative cases (see also FIG. 4).

[0143] In another analysis, the correlation between ARID1A mutations and BAF250a expression was evaluated by means of immunohistochemical staining for BAF250a in 182 tumors for which formalin-fixed, paraffin embedded sections were available in the discovery cohort and the mutation-validation cohort described above: 73 ovarian clear-cell carcinomas, 33 endometrioid carcinomas, and 76 high-grade serous carcinomas. The presence of mutations was significantly associated with BAF250a loss in endometriosis-associated cancers (P<0.001 by Fisher's exact test). A total of 27 of 37 samples (73%) and 5 of 10 samples (50%) of ovarian clear-cell carcinoma and endometrioid carcinoma, respectively, with an ARID1A mutation showed a loss of BAF250a expression, as compared with 4 of 36 samples (11%) and 2 of 23 samples (9%), respectively, without an ARID1A mutation (FIG. 12 and FIG. 13A). Loss of BAF250a expression was strongly associated with the endometriosis-related ovarian cancers—with 31 of 73 samples (42%) of ovarian clear-cell carcinoma and 7 of 33 samples (21%) of endometrioid carcinoma showing a loss of expression—as compared with high-grade serous carcinomas, for which 1 of the 76 samples (1%) had loss of expression (P<0.001 by Fisher's exact test) (FIG. 13A). ARID1A mutations were not significantly associated with the presence of endometriosis in 86 ovarian clear cell carcinomas and 33 endometrioid carcinomas (FIG. 9).

[0144] The immunohistochemical validation cohort was also assessed for BAF250a expression (FIG. 13B). This analysis revealed that 55 of the 132 samples (42%) of ovarian clear-cell carcinoma, 39 of the 125 samples (31%) of endometrioid carcinoma, and 12 of the 198 samples (6%) of high-grade serous carcinoma lacked BAF250a expression. These findings are in agreement with the proportions observed in the discovery and mutation-validation cohorts. No significant associations with absence of BAF250a expression were noted on the basis of age of presentation, stage of disease (low or high), or disease-specific survival within any of the cancer subtypes, as assessed by means of Welch's analysis of variance, Fisher's exact test, and the log-rank statistic, respectively (P>0.05 for all analyses).

[0145] With reference to FIG. 13, the percentages of tumors (with number and total number in parentheses) from three subtypes of ovarian cancer—clear-cell carcinoma (CCC), endometrioid carcinoma (EC), and high-grade serous (HGS) carcinoma—from the discovery and mutation-validation cohorts that showed loss of BAF250a expression are shown in Panel A for samples with and samples without ARID1A mutations and in Panel B for samples in the discovery and mutation-validation cohorts and samples in the immunohistochemical validation cohort. The rate of BAF250a loss was higher among CCC specimens with an ARID1A mutation than among those without an ARID1A mutation (P<0.001); the same was true for EC specimens (P=0.02). The loss of expression was also consistently more common in CCC and EC (the two endometriosis-associated carcinomas) than in HGS carcinoma when assessed in the discovery and mutation-validation cohorts and again in the immunohistochemical validation cohort (Panel B), with P<0.001 for all comparisons. All P values were calculated with the use of Fisher's exact test.

### Example 6.2.3

### Analysis of ARID1A in Associated Endometriosis

[0146] Two patients with ovarian clear-cell carcinomas (samples CCC 13 and CCC23) carrying ARID1A mutations had contiguous atypical endometriosis.

[0147] Case CCC23 had an ARID1A truncating mutation (G6139T (E2047*)) in exon 20 and had BAF250a loss in both cancer and contiguous atypical endometriotic epithelium (FIG. 14); HNF-1β was expressed in the CCC only, and ER was expressed in the atypical endometriotic epithelium. IHC analysis of distant endometriosis, away from the CCC, was also positive for BAF250a and ER expression, and negative for HNF-1β. The E2047* mutation was heterozygous in the tumor and present in 17/42 clones from the contiguous atypical endometriosis and 0/52 clones from a distant endometriotic lesion (Fisher p<0.0001). Thus, the contiguous atypical endometriosis showed ER expression and absence of HNF-1β expression, similar to distant benign endometriotic lesions, but had the same ARID1A mutation as the CCC. Thus, atypical endometrium could be distinguished from the distant endometrium only on the basis of loss of BAF250a expression, which correlated with the presence of an ARID1A mutation.

[0148] With reference to FIG. 14, panel A shows a section (hematoxylin and eosin [H&E]) on which a clear-cell carcinoma (black arrow) has arisen in an endometriotic cyst (white arrow). The same section, viewed at a higher magnification, shows regions of the clear-cell carcinoma and contiguous atypical endometriosis. A region of distant endometriosis from the same patient is also shown. Panel B shows the results of immunohistochemical staining of the epithelial portions of tissue specimens shown in Panel A for expression of BAF250a, hepatocyte nuclear factor 1β (HNF-1β), and estrogen receptor (ER). BAF250a immunoreactivity is lost in both the clear-cell carcinoma and the contiguous atypical endometriosis but is maintained in the distant endometriosis. Both regions of endometriosis differ from the carcinoma in their lack of HNF-1B expression (with weak expression in the contiguous atypical endometriosis) and maintenance of estrogen-receptor expression. Panel C shows sequencing chromatograms for the clear-cell carcinoma and polymerase-chain-reaction (PCR) clones of microdissected material from the contiguous atypical endometriosis and distant endometriosis, from which DNA was extracted. The carcinoma and contiguous atypical endometriosis show nucleotide variation corresponding to G6139T (as indicated with the dashed box); the tumor shows a heterozygous peak at that location, whereas the atypical endometriosis is homozygous for the substitution (in 17 of 42 clones). In contrast, the distant endometriosis shows wild-type sequence (in all 52 clones analyzed). None of the PCR clones from the distant endometriosis showed variation from the wild-type sequence.

[0149] The second case, CCC13, data shown in FIG. 15, had two mutations of ARID1A: T5953C(S1985P) a somatic missense mutation, and a truncating indel mutation 5541 ins G. Both mutations were heterozygous in the tumor and all cloned PCR products from distant endometriosis were negative for the mutations (0/58 for T5953C; 0/59 5541InsG). In contrast, the missense mutation was present in 20/51 clones from the adjacent atypical endometriosis whereas the indel mutation was seen in only 3/54 clones supporting that this insertion may be a second hit involved in the clonal evolution of the endometriosis into the CCC. Both these mutations, along with a CTNNB1 missense mutation, were present in the tumor and the adjacent atypical endometriosis but not in a distant endometriotic lesion (FIG. 15, panel B).

[0150] With reference to FIG. 15, results for clear cell carcinoma and adjacent atypical endometriosis for specimen CCC 13 are shown. Panel A shows H&E stained sections from clear cell carcinoma (*) arising in an endometriotic cyst (†) at low power showing adjacent histologies (a), and at higher power showing regions of the clear cell carcinoma (b) and adjacent atypical endometriosis (c). A distant region of endometriosis from the same individual is shown at low power (d). Panel B shows that BAF250a immunoreactivity is lost in the epithelial portion of both the clear cell carcinoma and adjacent atypical endometriosis, however is maintained in the distant endometriosis. HNF-1β can be seen in both the tumor and the adjacent atypical endometriosis, however is largely negative with only occasionally positive cells in the distant endometriosis. ER is highly expressed only in the distant endometriosis and is lost in both the tumor sample and adjacent atypical endometriosis. Panel C shows sequencing chromatograms from the clear cell carcinoma and a PCR clone from contiguous atypical endometriosis clearly show the nucleotide variation corresponding to T5953C(S1985P). This mutation was present in 20/51 clones from the contiguous atypical endometriosis. In contrast, all cloned PCR products (from 58 clones) from distant endometriosis, which maintained BAF250a expression, show only wild type sequence. A heterozygous peak is seen in the DNA from the tumor. Micro-dissected material from both endometriosis samples was used to extract DNA, amplify by PCR, clone and sequence. None of the PCR clones from the distant endometriosis showed variation from the wild-type sequence. Panel D: as in panel “C” sequencing chromatograms from the clear cell carcinoma and a PCR clone from contiguous atypical endometriosis show an insertion of an additional G (5541InsG). This mutation was present in 3/54 clones from the contiguous atypical endometriosis. In contrast, all cloned PCR products (from 59 clones) from the distant endometriosis, which maintained BAF250a expression, show only wild type sequence. Sequencing read from the tumor sample shows characteristic overlapping reads corresponding to the in frame and out of frame alleles after the insertion point. As in “C” sequence from PCR clones are shown for both adjacent atypical endometriosis and distant endometriosis.

[0151] Sanger sequencing was carried out on CCC13. The two somatic mutations (5541insG and T5953C(S1985P)) were sequenced from a single PCR fragment. PCR products were cloned and then resequenced. In total, sequences from 45 clones were analyzed. The inventors found 15/45 (33%) wildtype sequence, 9/45 (20%) sequences with the T5953C (S1985P) mutation, 9/45 (20%) sequences with the 5541insG mutation, and 12/45 (27%) sequences with both mutations in a single Sanger sequence trace. This reveals the complex relationship between the mutations which occur both in trans (on independent alleles) and also in cis (on the same allele) (see FIG. 16). This finding along with the presence of wildtype alleles, suggest that this tumor is aneuploid and a gene conversion or other rearrangement at the ARID1A locus has occurred and is present in a subset of cells.

[0152] Mutations including truncating and somatic missense mutations, and one ARID1A rearrangement, were seen in 56/119 (47%) CCCs and 10/33 (30%) ECs ( 66/153 or 43% in total); but in only 1/76 (1%) high-grade serous ovarian carcinomas. All truncating mutations for which germline DNA was available were somatic and fifteen cases had two somatic mutations. Loss of BAF250a protein correlated strongly with truncating mutations. In two CCCs the ARID1A mutations and loss of BAF250a expression was evident in the tumor and contiguous atypical endometriosis, but not in distant endometriotic lesions or normal tissue.

### Example 6.2.4

### Differential Gene Expression in ARID1A Mutants

[0153] Results for the 50 genes with the greatest differential expression with respect to cells having an ARID1A mutation are shown in FIG. 21. FIG. 21 shows both the genes differentially expressed in mutant ARID1A containing cells versus wild-type, and the fold-change in expression of these genes relative to wild type. These genes represent potential target genes to be used in synthetic lethal screening, and also represent potential drug targets for development of new CCC, EOC, uterine cancer treatments.

### Example-6.3

### Discussion of Experimental Results

[0154] Overall, 46% of CCC and 30% of EC had somatic truncating or missense mutations in ARID1A as opposed to none in 76 specimens of HGS carcinoma analyzed. Loss of ARID1A expression was also subtype specific with loss of nuclear BAF250a seen in 39% of CCC and EC but only 1% of HGS carcinomas.

[0155] There are a number of lines of evidence supporting a significant biological role for somatic ARID1A mutations. Firstly, the mutations identified are almost exclusively truncating mutations, expected to encode non-functional protein. They are present at a high frequency in endometriosis associated ovarian carcinomas but not HGS carcinoma, two distinct tumor types, strongly suggesting that they are highly relevant in the former, and not random events. By comparing clear cell carcinomas to their adjacent atypical endometriotic lesions, the inventors have demonstrated that the same mutations are present in the putative precursor lesions as the tumors. In contrast, the distant endometriotic lesions are mutation negative.

[0156] In the case shown in FIG. 14, the mutation is present before the atypical endometriosis has developed the immunophenoptype associated with the cancer (ER negative, HNF-1β positive) suggesting that the mutation is a very early event in neoplastic transformation. The presence of mutations is strongly correlated with loss of BAF250a protein, suggesting that the normal allele is usually lost, and further supporting an important role for ARID1A in oncogenesis. Lastly the finding of two mutation events at the locus in 15 cases, together with the finding of truncating mutations spread evenly across the coding region and frequent loss of protein expression, suggests that ARID1A is a classic tumor suppressor gene. Unlike BRCA or p53 mutations, which can be found in the germline, all ARID1A mutations were somatic; this may be explained by the observation that heterozygous mutation of ARID1A is an embryonic lethal mutation in mice.

[0157] Four additional mutations were identified when the RNAseq cases were analyzed by amplicon exon resequencing; these mutations were likely not seen in RNAseq data due to transcripts being rapidly targeted for nonsense mediated decay (NMD)⁴³, indicating that RNAseq, although a useful discovery tool, has imperfect sensitivity for detecting nonsense and other truncating mutations.

[0158] In CCC and EC loss of expression was seen in 67% of mutation positive cases and only 16% of mutation negative cases. It is possible that the mutant negative CCC and EC with loss of BAF250a expression may have lost ARID1A expression through other mechanisms such as chromosomal rearrangements, epigenetic silencing, expression of transcriptional repressors or post-translational mechanisms. The presence of BAF250a immunoreactivity in a minority of cases with protein truncating mutations may indicate that haploinsufficiency (which is embryonic lethal in a mice) is pathogenic. Alternatively it may be due to second hit events that do not impact protein expression levels, a dominant negative function of some mutations, or detection of truncated but dysfunctional protein in the IHC assay. The latter is possible in some cases as the antibody used targets the middle of the protein (between exons 14-16).

[0159] Though there is long standing evidence that endometriosis is a major risk factor for CCC and EC, the molecular mechanism of this transformation is unknown^{44,45}. Mutations in the PTEN gene have been described in 20% of endometriotic cysts. In a mouse model, Cre-mediated expression of oncogenic K-ras was found to induce endometriosis, while a second hit in the tumor suppressor Pten caused progression to endometrioid carcinoma, however K-ras mutations are not seen in human endometriosis or endometriosis associated ovarian cancers.

[0160] Gaining an understanding of initiating events for CCC and EC subtypes could lead to the development of new therapeutic approaches and enable the creation of identification tools for endometriotic lesions that are at risk for neoplastic transformation. Mutations in ARID1A and loss of BAF250a expression were preferentially seen in CCC and EC, cancers that do not feature the genomic chaos, near ubiquitous TP53 mutations, and frequent BRCA abnormalities of HGS carcinomas. If HGS carcinomas are characterized by gross structural abnormalities in chromosomes, it is possible that defects in genes that alter the use of chromatin, along with previously described WNT and PI3 kinase pathway mutations will define CCC and EC. If such a model is correct, other abnormalities impacting the ARID1A locus or dysregulation of other chromatin remodeling genes will be found in the ARID1A mutation negative CCC and EC. This is supported by the clinical similarities between ovarian clear-cell carcinomas positive for and those negative for an ARID1A mutation.

[0161] The mechanism by which somatic mutations in ARID1A enables the progression of the benign condition of endometriosis to carcinoma has yet to be elucidated, however, the foregoing findings strongly suggest a fundamental role for ARID1A mutation in the genesis of both CCC and EC. The loss of ARID1A in endometriotic epithelium appears to be of importance in malignant transformation in this tissue type.

[0162] These data implicate ARID1A as a tumor suppressor gene frequently disrupted in CCC and EC. As ARID1A mutation and loss of BAF250a can be seen in the pre-neoplastic lesions, this is an early event and likely critical in the transformation of endometriosis into cancer.

### Example 7.0

### Loss of BAF250a Expression is Common in Endometrial Carcinomas but Infrequent in Other Types of Malignancies

[0163] To demonstrate whether BAF250a loss is common in other malignancies, immunohistochemistry (IHC) screening for BAF250a expression was performed on tissue microarrays (TMAs) in more than 3000 cancers, including carcinomas of breast, lung, thyroid, endometrium, kidney, stomach, oral cavity, cervix, pancreas, colon, and rectum, as well as endometrial stromal sarcomas, gastrointestinal stromal tumours (GIST), sex cord-stromal tumours and four major types of lymphoma (diffuse large B-cell lymphoma [DLBCL], primary mediastinal B-cell lymphoma [PMBCL], mantle cell lymphoma [MCL], and follicular lymphoma). The inventors have demonstrated that BAF250a loss is frequent in endometrial carcinomas, but infrequent in other types of malignancies, with loss observed in 29% of Grade 1 or 2, and 39% of Grade 3 endometrioid carcinomas of the endometrium, 18% of high grade serous, and 26% of clear cell carcinomas. Since endometrial cancers showed BAF250a loss, the inventors stained whole tissue sections for BAF250a expression in 9 cases of atypical hyperplasia and 10 cases of atypical endometriosis. Of the 9 cases of complex atypical endometrial hyperplasia, all showed BAF250a expression, however of 10 cases of atypical endometriosis (the putative precursor lesion for clear cell and ovarian carcinoma), one case showed loss of staining for BAF250a in the atypical areas with retention of staining in areas of non-atypical endometriosis; this was the sole case that recurred as an endometrioid carcinoma, indicating that BAF250a loss may be an early event in carcinogenesis. Since BAF250a loss is seen in endometrial carcinomas at a rate similar to that seen in ovarian carcinomas of clear cell and endometrioid type and is uncommon in other malignancies, loss of BAF250a is a particular feature of carcinomas arising from endometrial glandular epithelium.

### Example 7.1

### Materials and Methods

### Example 7.1.1

### Sample Collection

[0164] Cases from the archives of Vancouver General Hospital, St. Paul's Hospital, and the British Columbia Cancer Agency were used to construct tissue microarrays (TMA) from duplicate 0.6 mm cores, as described previously⁴⁶. The follicular lymphoma TMA was constructed using duplicate 1.0 mm cores. For the studies of atypical hyperplasia of the endometrium, hysterectomy cases where there was no co-existent carcinoma were used and full sections were immunostained. Immunostaining on the cases of atypical endometriosis was also performed on full sections. All prospectively collected patient samples were collected with informed patient consent under a research ethics board (REB)-approved protocol, and analysis of archived samples was covered by pre-existing REB approvals.

### Example 7.1.2

### Immunohistochemical (IHC) staining

[0165] Immunohistochemical (IHC) staining for BAF250a was performed on all cases included in this study. IHC was performed on 4μm thick paraffin sections of tissue microarrays or whole tissue sections on the semi-automated Ventana Discovery® XT instrument (Ventana Medical Systems, Tucson, Ariz.) using the Ventana ChromoMar DAB kit. Antigen retrieval was standard CC1 with a two hour primary incubation. BAF250a mouse clone 3112 (Abgent, San Diego, Calif.) was applied at 1:50 followed by a 16-minute secondary incubation of pre-diluted UltraMap™ Mouse HRP (Ventana). Histologic images were obtained with the use of a ScanScope XT digital scanning system (Aperio Technologies Inc.,Vista, Calif.).

### Example 7.1.3

### IHC Scoring

[0166] The scoring for BAF250a was performed as previously described⁴⁷. Non-neoplastic cells, including endothelial cells, fibroblasts, and lymphocytes, normally show BAF250a nuclear staining and served as positive internal controls. Positively scored tissue cores were ones that contained any positive tumour cell nuclear staining, regardless of intensity. Negatively scored tissue cores were ones that showed completely absent tumour cell nuclear staining, as well as positive normeoplastic cell nuclear staining. Tissue cores lacking tumour cells were not scored. Cases in which neither normal cells in the stroma nor tumour cells were immunoreactive were considered to be the result of technical failure. Each case on a tissue microarray was represented as duplicate cores; one positive core in a duplicate was sufficient to count the case as positive.

### Example 7.2

### Results

[0167] Overall, loss of BAF250a expression measured by IHC was not a common event in nongynaecological malignancies (FIGS. 17 and 18), with loss of BAF250a in more than 10% of cases of a given tumour type only seen in gastric cancer (14%) and anaplastic thyroid carcinoma (14%). Cancers of endometrial origin showed the highest frequency of BAF250a loss, with 29% of Grade 1 or 2 endometrioid, 39% of Grade 3 endometrioid, 26% of clear cell, and 18% of high grade serous cancers of the endometrium showing BAF250a expression loss (FIGS. 17 and 19), while 14% of uterine carcinosarcomas showed BAF250a loss.

[0168] Nine cases of complex atypical hyperplasia of the endometrium were stained for BAF250a, and all nine showed the same pattern of staining as adjacent normal endometrium (i.e. moderate to intense nuclear positivity). Of the ten cases of atypical endometriosis, all but one showed retention of BAF250a (i.e. normal staining pattern). A single case showed of loss of staining in the cytologically atypical areas with retention of staining in non-atypical endometriosis (FIG. 20). This patient developed frank carcinoma of endometrioid type at this site (cul-de-sac) 2 years later.

### Example 7.3

### Discussion

[0169] BAF250a, the protein encoded by ARID1A (the AT-rich interactive domain1A gene) is one of the accessory subunits of the SWI/SNF chromatin remodeling complex believed to confer specificity in the regulation of gene expression^{27,28}. The SWI/SNF complex consists of multiple components, with the core catalytic subunit utilizing ATP to mobilize nucleosomes, thus providing transcriptional control of genes by altering the accessibility of the promoter regions by the transcriptional machinery. The SWI/SNF complex, ubiquitous in eukaryotes, is important for the regulation of diverse cellular processes, from development, differentiation and proliferation to DNA repair and tumour suppression²⁶.

[0170] The results of this Example establish that loss of BAF250a is characteristic of a wide range of tumours arising from eutopic as well as ectopic endometrium, but is uncommon in other tumour types studied. The carcinomas of the endometrium, particularly those of higher grade, show the most frequent loss of BAF250a. In the carcinomas of the endometrium that showed BAF250a loss, the mutational status of the ARID1A gene is not known. However in the clear cell and endometrioid carcinomas of the ovary, mutation of ARID1A correlates well, although not perfectly, with BAF250a expression. Therefore, the inventors hypothesize that in carcinomas of the endometrium with BAF250a loss, most will harbor mutations in the ARID1A gene. In cases that do not show BAF250a loss, it is possible that other components of the SWI/SNF chromatin remodeling complex will show loss of function. Additionally, since the deletion of ARID1A on one allele results in embryonic lethality in mice, it is possible that mutations in ARID1A resulting in partial loss of BAF250a expression could have a biologic effect in tumours and the effect of ARID1A may be underestimated by screening for total BAF250a loss by IHC⁴⁸. The measurement of partial loss would require a nuanced approach to scoring or the use of multiplexed immunofluorescence.

[0171] In this study, the inventors did not identify BAF250a loss in any of the nine cases of atypical endometrial hyperplasia. One of the ten cases of atypical endometriosis had loss of BAF250a expression. This patient returned two years later with an endometrioid carcinoma at the location of the atypical endometriosis. This finding could be interpreted in two ways. Firstly BAF250a loss and thus ARID1A mutation is a late event in the progression of precursor lesions to cancer or that the particular lesion studied was already fully malignant, although not recognized as such on morphological grounds. Either way, this case along with the frequency of BAF250a loss in frank carcinomas, the rarity (or absence) of loss in normal tissue and precursor lesions suggest that loss of BAF250a expression is a feature highly indicative of malignancy.

### Example 8.0

### Prospective Examples

### Example 8.1

### Demonstrate the Frequency and Clinical Significance of ARID1A and other SWI/SNF Mutations in Ovarian Carcinoma Subtypes

[0172] Approximately 30 genes including all 15 SWI/SNF genes will be analyzed for mutations in 150 clear cell carcinomas and 350 other ovarian cancers, using targeted next generation sequencing. When available, precursor lesions will be analyzed to assess if SWI/SNF mutations are early events in oncogenesis. It is predicted that tumours with SWI/SNF mutations will not contain mutations affecting pathways known to drive type I ovarian cancers, so samples will also be analysed for mutations in selected genes associated with these pathways. The 400 cases analysed by targeted resequencing along with an additional 1500 ovarian cases (that have clinical outcome data) will be immunohistochemically analysed to identify cases with loss of BAF250a expression and determine whether this correlates with ARID1A mutation status.

[0173] As described above, the inventors have demonstrated that approximately 39% of CCCs harbour mutations in the ARID1A gene. An additional two cases had mutations in other SWI/SNF complex genes. This observation will be expanded to determine the frequency of mutations in ARID1A and the other 15 genes coding SWI/SNF complex proteins mutations in a large cohort (˜400 cases) of ovarian carcinomas, including all pathological subtypes of this disease,^{26,49} to determine how frequently this complex is perturbed in ovarian cancer.

[0174] It is predicted that alterations in the SWI/SNF complex represent a mechanism of oncogenesis of fundamental significance, distinct from previously identified molecular pathways in ovarian carcinoma. This prediction will be confirmed by assessing the mutational status of several genes that are known to be involved in ovarian carcinomas. It is anticipated that chromosomally stable type I ovarian cancers will be able to be sub-categorized into two groups: (i) cancers with mutations in known oncogenic pathways and (ii) cancers with mutations affecting chromatin remodelling Immunohistochemistry will be used to assess BAF250a expression in the 400 sequenced cases along with 1500 additional ovarian cases.

[0175] DNA from 400 frozen ovarian tumour samples representing all subtypes will be used for targeted resequencing. All cases will have an accompanying source of germline DNA. Approximately 150 of these samples will be CCCs and the remaining 250 will be comprised of other ovarian cancer subtypes (50 endometrioid, 150 high grade serous, 25 low grade serous and serous borderline, and 25 mucinous and mucinous borderline). All 250 tumours representing non-CCC subtypes plus 35 CCCs will be obtained from the OvCaRe Tissue Bank (http://www.ovcare.ca/research/platforms.php) located in the Department of Pathology at the Vancouver General Hospital. The remaining 115 CCCs will be obtained from outside sources, such as 42 CCCs from the Australian Ovarian Cancer Study, 30 CCCs from the Institut du cancer de Montreal, 33 CCCs from Mt. Sinai School of Medicine, New York, 10 CCCs from Johns Hopkins University, and 9 CCC cell lines from Dr. Michael Anglesio. With 150 CCC cases, the rate of mutations in CCC will be determined with a margin of error of 8% or less (95% confidence level).

[0176] For immunohistochemical analysis of BAF250a protein expression, in addition to the 400 samples described above, another 1500 ovarian cancer samples assembled into tissue microarrays will be examined. These tissue microarrays include approximately 250 CCCs with the remaining cases representing other ovarian cancer subtypes, and have been described previously.^{4,50} In addition, 50 putative CCC precursor lesions, i.e. endometriosis and atypical endometriosis, will be analysed. Lesions from tumours used for targeted sequencing, described above, will be prioritized and the remaining cases will be from the Vancouver General Hospital Pathology Archives.

[0177] The 15 SWI/SNF genes along with genes known to be mutated in ovarian cancer including TP53, KRAS, BRAF, P1 LN, PI3KCA, CTNNB1, BRCA1, and BRCA2 will be sequenced. In total these include 406 exons and intron exon boundary sequence covering 120 kb. To accomplish this, genomic DNA libraries will be enriched with target genes, which will be analysed by next generation sequencing. Alternative approaches are less attractive as high throughput Sanger sequencing is expensive and insensitive to mutations found in less than 15% of alleles due to stromal contamination or intra-tumoural heterogeneity, sequencing of the polyA+ transcriptome would not detect mutations resulting in nonsense mediated mRNA decay, and whole exome sequencing would be too costly.

[0178] The inventors have extracted DNA from over 300 of the samples, and the other extractions will be performed using the Qiagen MagAttract™ kit on a Qiagen M48 robot. Quantification of DNA will be performed using the Quant-iT dsDNA HS assay kit and Qubit™ fluorometer (Invitrogen) prior to plate-based library construction. Libraries of sheared genomic fragments will be constructed in 96 well plates using a Covaris E210 sonication platform and Biomek™ FX liquid handler. Library construction begins with 1 μg of DNA which is automatically 1) sheared to an average size of ˜200 bp, 2) transferred to 96 well plates, 3) end-polished, 4) poly-A tailed, 5) ligated to barcoded adapters, and 6) PCR-amplified with oligonucleotides specific for sequences required for clonal cluster generation. Once constructed, libraries will be pooled (up to 94 samples in a single run) and enriched by solid or liquid phase capture probes.

[0179] There are competing approaches for target enrichment including using custom Agilent and Nimblegen solid and solution phase capture platforms however, to date, these platforms have not been validated for multiplexed sample capture and we would be required to examine the 400 samples as individual capture experiments, which would be cost prohibitive. Thus, a solid phase microfluidic capture platform developed by febit for the SOLiD™ 3.5 sequencing platform (febit biomed gmbh and Applied Biosystems, respectively) will be used. The febit HybSelect™ microarray-based capture method selectively captures fragments of sequence from complex genomic libraries through hybridization of DNA samples to specific oligonucleotides generated by light-activated in-situ synthesis on microfluidic chips (Geniom™ Biochip)⁵¹. Each Geniom™ Biochip contains 8 individually addressable arrays, each composed of >15,000 capture probes segmented into features of variable number and size. The number of features, density, and probe length are customizable, up to a maximum of 800 kb per array. Twelve barcoded SOLiD™ sequencing libraries will be pooled for each array (96 libraries per Geniom™ Biochip) and subjected to sequence capture, washing and elution on a Geniom™ RT device. The sequence capture steps will be performed by febit's Genomics services unit.

[0180] The enriched samples will be assessed and quantified using a DNA 1000 series II assay (Agilent) and Quant-iT dsDNA HS assay kit and Qubit™ fluorometer, respectively (Invitrogen). Sets of libraries will be further pooled (up to 96 samples per slide) and subjected to bulk emulsion PCR (emPCR), enrichment, and sequencing on the SOLiD™ 3.5 platform. Each bulk emPCR will be subjected to a work flow analysis (WFA) run on the SOLiD™ platform to ensure that noise to signal ratio are within specification. Once approved, the emPCR will be used for large scale bead deposition targeting ˜500 million reads per slide, 1 billion reads per run.

[0181] Data Analysis:

[0182] Image processing to colour calls will be performed on instrument and resulting files will be aligned to the reference human genome (NCBI build 36.1, hg18) using Bioscope™ v1.01 (Applied Biosystems). Variants in the resulting alignments will be detected using the diBayes package (Applied Biosystems). The probability of the existence of a heterozygote or a non-reference homozygote will be evaluated using prior probabilities of the SNP being a “miscolourcall”, “position error” or “probe error”. In addition, data will be analysed independently of the diBayes approach by aligning all reads in colourspace using the Mosaik aligner (http://bioinformatics.bc.edu/marthlab/Mosaik). This algorithm has several advantages over competing methods: it uses a banded Smith-Waterman approach for alignment that is more likely to detect insertions and deletions, it takes full advantage of the colourspace reads, and may be less prone to misalignment. Moreover, Mosaik seamlessly converts back to base-space and thus allows us to leverage the cancer-specific framework the inventors have developed for SNV detection called SNVMix 56 used in the discovery of the FOXL2 mutation in granulosa cell tumours of the ovary¹ and the analysis of genome-wide mutational evolution in a lobular breast cancer.²⁵ After alignment, we will predict SNVs and cross reference all non-synonymous protein coding predictions against a database of known SNPs to enrich the results for somatic variants.²⁵ All remaining non-synonymous SNVs and protein coding insertions and deletions will henceforth be referred to as somatic mutation candidates (SMCs). The SMCs will be validated by targeted ultra-deep amplicon sequencing in tumour and normal DNA on Illumina GA_{IIx} machines²⁵. This approach is expected to yield allelic frequency information and is sensitive enough to confirm SMCs, even those present in a small minority of cells. Reads will be aligned to the human reference genome using Maq 0.7.1 and variants will be assessed using a Binomial exact test followed by correction for multiple comparisons using the Benjamin-Hochberg method. All positions where the variant is statistically significantly present in the tumour but not the normal will be considered a validated somatic mutation.

[0183] Once the sequencing has been completed, the data will be used to identify and quantify all mutations. Validation of potential mutations will be performed by Illumina sequencing of PCR amplicons from tumour derived DNA.²⁵ Matched normal DNA will be assessed for the presence of all validated mutations to determine somatic versus germline status. It is estimated that there will be five potential mutations per case in the genes sequenced (thus 2000 mutations in 400 cases). The inventors have working primer sets for the known cancer genes and estimate the need to develop an additional 200 primer sets to validate mutations in SWI/SNF genes. Amplicons for all mutations will be placed into two pools, each of which will be used to create a library that will be run on a single lane of the Illumina G_{IIx} analyzer. The amplicons from normal and tumour DNA will be pooled into separate libraries to eliminate the need for barcoding. If identical changes are seen in multiple cases, these will be validated by Sanger sequencing. In cases where ARID1A mutations are found, LOH at the second allele will be assessed using FISH.

[0184] If the HybSelect method does not work as outlined above, alternative sequencing strategies will be used if needed: either Illumina-based sequencing of selected amplicons or Sanger sequencing will be used. If Sanger based sequencing is used, the number of cases analysed will be decreased to 100 due to increased costs associated with this approach.

### Example 8.2

### Validation of Frequency of BAF250a Expression in Ovarian Cancer

[0185] As described above, the inventors have demonstrated that the mutation status of ARID1A correlates with BAF250a expression. The above experiments were conducted using a mouse monoclonal antibody directed against a 111 amino acid region (amino acids 1216-1326) C-terminal to the ARID domain of BAF250a (clone 3H2Abgent Inc.). As this antibody targets the central region of the protein, there may be positive staining even when nonsense mutations within the C-terminus give rise to a truncated form of the protein. As several of the mutations identified by the inventors fall within the C-terminus (FIG. 2), the inventors are developing a C-terminal specific antibody for BAF250a. The C-terminal specific antibody will be used to re-immunostain all cases. Cases with missense mutations or inframe deletions would not be expected to show loss of BAF250a expression (with either antibody).

### Example 8.3

### Evaluation of Expression Levels of BAF250b

[0186] Expression of BAF250b (encoded by ARID1B) will also be assessed. Since SWI/SNF complexes cannot contain both BAF250a and BAF250b, it is predicted that depletion of BAF250a may correlate with increased BAF250b.

[0187] Based on the RNA-seq data described above, it appears that ARID1B expression levels are not affected by mutations in ARID1A and in fact are not variable when compared across all cancer types. However, in order to ensure that BAF250b protein expression is not increased due to BAF250a deficiencies, all BAF250a-negative cases will be immunostained for expression of BAF250b. Since SWI/SNF complexes cannot contain both BAF250a and BAF250b, it may be that the absence of BAF250a corresponds to an enrichment of BAF250b containing complexes. This would have functional consequences as BAF250a depletion has been shown to specifically inhibit cell cycle arrest, while BAF250b depletion has no effect on cell cycle arrest⁵². In addition, BRM, BRG1, and BAF47 immunohistochemistry will be done on all tissue microarrays.

[0188] Cases with unexplained loss of BAF250a, BRM, BRG1, or BAF47 expression will be re-examined for promoter hypermethylation, which has been described for BRM and BRG126, using primers designed through access to known tools such as http://www.urogene.org/methprimer/index.html or published primers. Immunostaining of all cases will be preformed at the Genetic Pathology Evaluation Centre^{8,14,50}.

### Example 8.4

### Statistical Analysis

[0189] With about 150 CCC cases, a determination of the rate of ARID1A mutations can be assessed to within +10%. Analysis of 400 ovarian cancer tumours will allow detection of differences in mutation rates between pathological or molecularly defined subtypes of 15% (80% power level). Mutation frequency in SWI/SNF genes will be compared between cancer subtypes using Fisher's exact test. It will be determined whether CCCs with ARID1A mutations or loss of expression have a distinct clinical phenotype by correlation with patient outcomes and tumour stage. Log rank test and Kaplan Meier plots will be used to assess differences in survival characteristics^{4,50}. Associations with clinical and biomarker data will be assessed with chi-square tests and contingency tables.

### Example 8.5

### Confirm that Mutations in ARID1A are Early Events in Oncogenesis

[0190] In all cases where mutations within SWI/SNF genes are found, putative precursor lesions (when present) will be analyzed by immunohistochemistry for BAF250a expression; FISH for chromosomal based LOH; and laser capture microdissection (LCM) followed by Sanger sequencing of cloned PCR products to assess ARID1A mutation status. This approach has already been used on case CCC23 discussed above.

### Example 8.6

### Determination of Functional Consequences of ARID1A Mutations in CCC Derived Cell Models

[0191] A determination will be made as to how ARID1A (wildtype, loss, and mutant) affects cell growth and survival in clear cell carcinoma cells and xenograft mouse models. The effect of ARID1A mutations on protein-protein interactions will be determined using co-immunoprecipitation experiments followed by mass spectrometry. To determine if ARID1A mutations affect recruitment to BAF250a targets, chromatin immumoprecipitation combined with next generation sequencing will be used (ChIP-seq). Genome-wide nuclease accessibility assays will be used to validate SWI-SNF-chromatin interactions identified in chromatin immunoprecipitation experiments (FIG. 22).

[0192] The inventors have developed a transplantable xenograft from VOA867 (CCC 14), a CCC with a heterozygous ARID1A truncating somatic mutation (C 1680A (Y560*)) in exon 3 resulting in complete loss of BAF250a expression. An ARID1A -null cell line (867CL) established from the VOA867 (CCC 14) xenograft to create isogenic derivatives will be used for all functional studies. Site-directed mutagenesis of the full length ARID1A cDNA (pCMV6-XL4 plasmid, OriGene Technologies) will be conducted to generate ARID1A constructs corresponding to mutations identified through RNA-seq. Specifically, 876CL isogenic lines will be created with 1) vector only as a control (867CL-vector), 2) the 6018-6020delGCT (2007AL) 3 by deletion found in VOA120 (867CL-ARID1A-ΔL2007), and 3) wildtype ARID1A (867CL-ARID1A-WT). To prevent disruption of BRG1 binding resulting from a BAF250a C-terminal GFP fusion, a vector with GFP expressed through an IRES site (internal ribosome entry site) and use BAF250a antibodies to validate expression. These ARID1A mutant and wild-type constructs will be packaged into pLVX-Puro lentiviral expression vector which will be used to infect 867CL cells. Transduced cells will be selected using puromycin and/or flow sorting for GFP. Stable clones will be derived by limited dilution to select clones with ARID1A expression that is comparable TOV-21G (a CCC derived cell line that endogenously expresses wildtype ARID1A). These cells (867CL, 867CL-vector, 867CL-ARID1A-ΔL2007, 867CL-ARID1A-WT) will be subjected to RNA-seq and differentially expressed genes will be mapped to pathways using Ingenuity Pathway Analysis software. These data will also be used to validate ChIP-seq results.

### Example 8.7

### Effect of ARID1A on Cell Cycle and Growth

[0193] The three isogenic and parent 867CL cells will be analyzed in vitro for growth and cell cycle activity. MTT (3-(4,5-dimethylthiazol-2-yl)-2,5-diphenyl tetrazolium bromide) assays will be used to evaluate proliferation status as a function of mitochondrial activity.⁵³ As a second measurement of cell survival, the cell colony formation assay will be used, which assesses cell cycle arrest or cell death leading to reduced colony formation.⁵⁴ As depletion of ARID1A plays a role in cell cycle repression,⁵² cell cycle activity will be assessed through analysis of DNA synthesis as measured by [³H] thymidine incorporation into DNA.⁵⁵ To further elucidate the biological function of ARID1A in vivo, the parent 867CL cells will be transplanted along with the three derived isogenic cells into NOD/SCID mice using the xenograft sub-renal capsule technique and growth properties of the tumour xenografts will be compared. If 867CL-ARID1A-WT xenografts have a longer tumour doubling time compared to ARID1A-null (867CL, 867CL-vector) or ARID1A-mutant (867CL-ARID1A-ΔL2007), this would further support that ARID1A acts as a tumour suppressor in CCCs.

[0194] If isogenic cell lines cannot successfully be created from 867CL cells, other ARID1A-null cells will be selected to serve as potential alternatives: 1) any of the nine CCC cell lines sequenced in the Examples above with loss of ARID1A expression or 2) IOSE (immortalized ovarian surface epithelium) or HCT116 cells stably expressing lentiviral ARID1A shRNA. Preliminary data demonstrate efficient ARID1A shRNA-mediated knock-down of BAF250a expression in HCT 116 cells (FIG. 8) and cells lacking BAF250a expression will be selected using puromycin and/or flow sorting for GFP.

### Example 8.8

### Immunoprecipitation of SWI/SNF Complexes

[0195] The inventors predict that 867CL and 867-vector cells will produce identical results in the cell cycle and growth assays described above. If this is the case, it will be concluded that the vector has no effect and will use only 867CL cells for the remaining experiments. Immunoprecipitation (IP) of SWI/SNF complexes is required for both assessment of protein composition (in MS experiments) and chromatin binding (in ChIP-seq experiments). IP experiments will be done from nuclear extracts in null (867CL), mutant (867CL-ARID1A-ΔL2007) and wildtype ARID1A (867CL-ARID1A-WT) cell lines using three SWI/SNF antibodies targeting: 1) one core component of the complex (i.e. BAF155, BAF170, or BAF47)⁴⁹; 2) BAF250b; and 3) BAF180. In addition, the inventors will IP SWI/SNF complexes using BAF250a antibodies from 867CL-ARID1A-ΔL2007, 867CL-ARID1A-WT, and TOV-21G cells (FIG. 22).

[0196] With reference to FIG. 22, initially, five cell lines will be assessed for the effect of ARID1A on cell growth: 867CL (no BAF250a expression), 867CL-vector (no BAF250a expression), TOV-21G (clear cell carcinoma derived with endogenous normal ARID1A expression), 867CL-ARID1A-WT (wildtype ARID1A expression in 867CL cells), and 867CL-ARID1A-ΔL2007 (mutant ARID1A and BAF250a expression). Assuming the introduction of the empty vector into 867CL cells has no effect, 867CL-vector cells will not be studied further for MS and ChIP-seq experiments. The remaining four cell lines will have SWI/SNF complexes isolated from nuclear extracts through IP of (1) BAF250b, (2) BAF180, and (3) BAF170, BAF155, or BAF47. In addition, those cells with BAF250a expression (either wildtype or mutant) will have SWI/SNF complexes isolated through IP of BAF250a. Protein composition and abundance of various SWI/SNF complexes will be investigated using MS. SWI/SNF binding to chromatin will be investigated using ChIP-seq.

[0197] Antibodies for IP⁵⁶ are available from Santa-Cruz (BAF170,sc-10757; BAF47, sc-16189; BAF250a, sc-32761) and Bethy Laboratories (BAF180, A301-590A; BAF155, A301-019A; BAF250b, A301-047A) and these will be tested to select antibodies that produce the cleanest results. As SWI/SNF complexes must contain one of BAF250a, BAF250b, or BAF180, ARID1A loss or mutations may manifest as dramatically reduced levels of wildtype BAF250a complexes and an increase in BAF250b or BAF180 containing complexes. A second consequence of ARID1A mutations may be alteration of the protein combinations within SWI/SNF complexes. A third consequence of these mutations may be changes in chromatin targets for SWI/SNF complexes which would affect gene regulation. These will all be investigated using the combination of MS and ChIP-seq experiments described below.

### Example 8.9

### The Effects of ARID1A Mutations on SWI/SNF Complex Composition

[0198] The inventors will use the multiple reaction monitoring (MRM) MS analysis technique to quantitate signature peptides for 15 known components of SWI/SNF complexes (FIG. 1)²⁶ in the IPed SWI/SNF complexes described above. MRM is a quantitative, highly sensitive, triple quadrupole MS scan technique used to quantify MS/MS fragments (termed transitions) emanating from a specific peptide (from a protein of interest).⁵⁶ For the 15 proteins to be measured, an MRM assay will be designed using MS/MS spectra for tryptic peptides obtained from MS spectra databases (http://www.peptideatlas.org/, http://gpmdb.thegpm.org/). One peptide for all SWI/SNF proteins will be selected. Each will be unique in the human proteome and have robust MS/MS signals, except in the case of BAF250a where three peptides (C-terminal, central, and N-terminal) will be selected so that any truncated versions of BAF250a will be detected. MS data will be collected on an ABI 4000QTrap M S which can measure all 17 peptides using 3 transitions per peptide in a single multiplex assay; transitions for each peptide will co-chromatograph in the MS analysis. MultiQuant (ABI) will be used to calculate the signal volume of each transition in the chromatograms. The transitions for each peptide will be summed and used to calculate the relative changes of the SWI/SNF proteins between samples. Values will be normalized for starting cell number, and perform three independent replicate experiments will be performed to allow for statistical analysis.

[0199] Comparison of 867CL to 867CL-ARID1A-WT or TOV-21G cells will identify changes associated with altered overall SWI/SNF complex composition and altered BAF250b and BAF180 complex composition associated with ARID1A loss in CCCs. It is predicted that the SWI/SNF composition of 867CL-ARID1A-ΔL2007 compared to 867CL-ARID1A-WT and TOV-21G will identify proteins gained or lost due to BAF250a interactions that are dependent on contacts to Leu2007 or tertiary structures affected by the Leu2007 residue. This will be verified by IP of SWI/SNF complexes using the BAF250a antibody in 867CL-ARID1A-ΔL2007, 867CL-ARID1A-WT, and TOV-21G cells.

[0200] IP of SWI/SNF complexes from nuclear extracts using antibodies to SWI/SNF core proteins and analysis by MS/MS has succeeded in identifying all of the core proteins to be monitored^{57,58}, thus the more sensitive MRM technique should also be successful. Technical replicates for MRM analysis vary by less than 5%, thus it is anticipated that small (10-20%) changes in the relative levels of individual SWI/SNF proteins in the overall pool of SWI/SNF components will be detectable. The experiments will not be able to differentiate between SWI/SNF complexes with different compositions, but should detect major adjustments in SWI/SNF complex composition due to the loss of BAF250a. If the data identify compelling changes, experiments to characterize individual SWI/SNF complexes in the BAF250a mutant lines would be performed. Using biochemical size fractionation chromatography and the MRM assay, the molar stoichiometry of individual SWI/SNF complexes and their components would be determined

### Example 8.10

### ARID1A Interaction with Chromatin

[0201] Experiments will be conducted to determine if mutations in ARID1A lead to distinctive SWI/SNF-chromatin interactions. The effect of ARID1A mutations on BAF250a mediated transactivation will be assayed using a luciferase reporter construct. ChIP-seq and nuclease protection assays⁵⁹ will assess how wildtype and mutant BAF250a proteins differentially interact with chromatin.

[0202] Effect of ARID1a Mutations on Transactivation:

[0203] The XG46TL plasmid will be obtained that contains multiple glucocorticoid receptor response elements upstream of a luciferase reporter which will be transiently transfected into the four cell lines (867CL, 867CL-ARID1A-WT, 867CL-ARID1A-ΔL2007, TOV-21G). Cells will be treated with dexamethasone to stimulate the glucorticoid receptor which acts in concert with the SWI/SNF complex to activate transcription; this can be assessed through quantitation of luciferase as previously described.⁶⁰ Using this reporter system, effects of ARID1A mutations on transactivation can be directly assessed.

[0204] Effect of ARID1A Mutations on BAF250a Interaction with DNA:

[0205] The impact of ARID1A mutations on SWI/SNF complex binding to chromatin will be assessed using ChIP-seq to identify promoters interacting with SWI/SNF complexes in the four cell lines described above. IP's will be done as described above, in duplicate. The tools required for ChIP-seq and associated analysis have been previously described.⁶¹ The coverage chosen (˜5 Gbp per library) will achieve the redundancy necessary to find high confidence peaks while maintaining budget constraints.

[0206] Cell lines will be treated with formaldehyde to cross-link DNA and associated proteins. Cleared cell lysates will be sonicated to shear the chromatin, then incubated with the selected SWI/SNF antibody followed by overnight Protein A/G Sepharose precipitation. Chromatin IPs will be washed, eluted, used to create an Illumina sequencing library, and sequenced in one lane of an Illumina flow cell. Paired reads will be aligned to the reference human genome with Exonerate (http://www.ebi.ac.uk/˜guy/exonerate) or Maq.⁶² Regions of clustered sequence tags (peaks) corresponding to chromatin will be defined using FindPeaks software.⁶³ Sequences not present in both biological replicates or found to be in common with the ARID1A-wildtype (867CL-ARID1A-WT, TOV21G), ARID1A-mutant (867CL-ARID1A-ΔL2007, and ARID1A-null (867CL) cells will be removed from analysis. Data will be analysed with MEME⁶⁴ to detect any over-represented motifs and with TRANSFAC to find known transcription factor binding sites. Finally, genes and highly conserved intergenic sites will be identified proximal to peaks. It is expected to see on the order of 1000 peaks at false discovery rate=0.05. These areas will be prioritized based on where they are located (i.e. promoter regions upstream of target genes), the relevance of genes that may be transcriptionally regulated by these regions, and by the data obtained from the targeted sequencing and MS experiments.

[0207] This approach will allow identification of high confidence DNA-protein interactions in the primary dataset and eliminate signals due to sporadic or non-specific DNA-protein binding. Interactions of interest will be validated with orthogonal techniques including interactions of BAF250a with selected promoters upstream of a luciferase reporter gene. To determine whether findings from the ChIP-seq experiments are supported by expression changes for the implicated genes, data generated from triplicate libraries from the 867CL, 867CL-vector, 867CL-ARID1A-WT, and 867CL-ARID1A-ΔL2007cell lines which will be analysed by RNA-seq for differential gene expression using the edgeR Bioconductor statistical package.⁶⁵ Briefly, edgeR models read count data for a particular gene according to a negative Binomial distribution. Using an overdispersed Poisson model for differential gene expression analysis, the model is able to account for both technical and biological variation. All genes showing differential expression and concomitant differential ChIP-seq peak detection in their promoter regions will be selected as candidate genes affected by ARID1A mutation.

[0208] Effects of ARID1A Mutations on In Vivo Nucleosome Remodelling:

[0209] Nucleosome-free DNA is sensitive to digestion by low concentrations of nuclease and ARID1A mutations may be reflected as changes in nuclease sensitivity. Nuclease sensitivity at 20 ARID1A targets identified through ChIP-seq will be assessed, focusing on genes that are known drug targets or cancer genes and for which the ChIP-seq data correspond to changes in gene expression through RNA-seq. Briefly, nuclei from CCC cell lines will be treated with low concentrations of micrococcal nuclease or DNAaseI, causing only DNA from nucleosome-free regions to be degraded. The remaining protected DNA will be sequenced using primers specific for each target.

[0210] In the event that no changes in SWI/SNF composition or DNA binding are identified in the presence of ARID1A mutations, it will additionally be assessed whether these mutations result in alteration of histone ubiquitination, as it was recently demonstrated that BAF250b (the gene product of ARID1B) is an E3 ubquitin ligase for histone H₂B at lysine (K)120.⁶⁶

### Example 8.11

### Identification of Therapeutic Targets in CCC with ARID1A Mutations

[0211] An siRNA library will be used to identify genes that are necessary for survival of cells expressing mutant ARID1A. Any identified genes would be potential targets for the development of therapeutics for clear cell cancers with ARID1A mutations. The siRNA library will be screened in xenograft mouse models of ARID1A mutant clear cell carcinomas.

[0212] An established approach to identifying therapeutic targets in cancer, is to search for “synthetic lethality”, also known as conditional genetics. The prototype example of synthetic lethality is PARP inhibition in the context of BRCA1 or BRCA2 deficiency^{67,68}. To define therapeutic targets that would be uniquely effective in tumours bearing ARID1A mutations, a synthetic lethal (viability) screen will be conducted using established siRNA/high content screening methodology. A fully integrated siRNA screening facility equipped with robotics, fluid handling and an INCELL 1100 high content imager. The inventors will use a published siRNA/high content multiparameter screening method⁶⁹ to measure seven phenotypic parameters relevant to cell viability, proliferation, cell cycle, and associated checkpoints.

[0213] The siRNA libraries screened will be the Hannon/Elledge lenti-shRNA human library (approx 66,000 constructs) and the Dharmacon siGenome pools, representing approximately 22,000 gene loci. Both libraries have been internally formatted for 96 well and 384 well screens. In preference, the siRNA library pools will be used for screening at 25 nM. If for any reason siRNA transfection proves difficult, the shRNA library will be used. The 867CL, 867CL-ARID1A-ΔL2007, 867CL-ARID1A-WT cells will be used. If screening using these cell lines proves intractable, an isogenic knockout of ARID1A in HCT116 cells will be used as a second choice (FIG. 8).

[0214] Cell lines will be compared pairwise, in 384 well plates. Each transfection plate will contain controls for transfection efficiency, transfection toxicity and siRNA effectiveness, and phenotypic baseline measurements. In the primary screens, all 22,000 siRNA pools/66000 shRNAs (representing the full human gene complement thus far established) will be used. The screen will be performed in 384 well plates on the three isogenic cell lines, in triplicate. Control plates (all wells transfected with the same non-targeting siRNA) will be used to correct for well position effects in a linear mixed effects model. Cells will be transduced with 25 nM of siRNA pools or lentiviral particles at a MOI of 3, as appropriate. The effects of each siRNA pool or shRNA on cell viability, cell shape and transduction efficiency will be measured 4 days post transfection. Transduction efficiency will be evaluated using control wells from each screen plate, containing PLK1 siRNA. All conditions will be assessed in triplicate to allow adequate assessment of variability. After image segmentation and quantification as described, the data will be analysed with a linear mixed effects model⁷⁰ to handle known screening artefacts such as wellplate edge effects, reagent dispenser pipette tip effects etc. Multiple comparisons adjustments will be performed using the Benjamin-Hochberg approach for p-values, and empirical Bayes shrinkage for effect estimates where appropriate^{71,72} To measure the degree of synthetic interaction, an interaction index (scaled ratio of wt phenotype size to mutant phenotype size, for a given siRNA) will be calculated from linear model adjusted values. The top 5% of candidate shRNA targets, based on ranked synthetic effect magnitude and ranked p-value, will be triaged for follow-up validation. Following primary screening and selection of initial hits, these will be rescreened individually (pool deconvolution) for maximum discrimination. Re-validated siRNAs will also be assayed in conjunction with qRT-PCR (quantitative reverse transcriptase PCR) for the target transcript to determine whether the phenotype segregates with the degree of transcript knockdown. siRNAs surviving these filters will be grouped by GO-terms and structural class, for further follow up.

[0215] While a number of exemplary aspects and embodiments have been discussed above, those of skill in the art will recognize certain modifications, permutations, additions and sub-combinations thereof. It is therefore intended that the following appended claims and claims hereafter introduced are not limited by the preferred embodiments set forth in the disclosure and the examples, but are to be given the broadest interpretation consistent with the specification as a whole.

### REFERENCES

[0216] 1. Shah S P, Kobel M, Senz J, Morin R D, Clarke B A, Wiegand K C, Leung G, Zayed A, Mehl E, Kalloger S E, Sun M, Giuliany R, Yorida E, Jones S, Varhol R, Swenerton K D, Miller D, Clement P B, Crane C, Madore J, Provencher D, Leung P, DeFazio A, Khattra J, Turashvili G, Zhao Y, Zeng T, Glover J N, Vanderhyden B, Zhao C, Parkinson C A, Jimenez-Linan M, Bowtell D D, Mes-Masson A M, Brenton J D, Aparicio S A, Boyd N, Hirst M, Gilks C B, Marra M, Huntsman D G. N Engl J Med Mutation of FOXL2 in granulosa-cell tumors of the ovary 2009; 360:2719-29
[0217] 2. Kobel M, Kalloger S E H, D. G., Santos J, Swenerton K D, Seidman J D, Gilks C B. Int J Gynecol Pathol Differences in tumor cell type in low versis high stage ovarian carcinomas; in press
[0218] 3. Gilks C B, Prat J. Hum Pathol Ovarian carcinoma pathology and genetics: recent advances 2009; 40:1213-23
[0219] 4. Kobel M, Kalloger S E, Boyd N, McKinney S, Mehl E, Palmer C, Leung S, Bowen N J, Ionescu D N, Rajput A, Prentice L M, Miller D, Santos J, Swenerton K, Gilks C B, Huntsman D. PLoS Med Ovarian Carcinoma Subtypes Are Different Diseases: Implications for Biomarker Studies 2008; 5:e232
[0220] 5. Crotzer D R, Sun C C, Coleman R L, Wolf J K, Levenback C F, Gershenson D M. Gynecol Oncol Lack of effective systemic therapy for recurrent clear cell carcinoma of the ovary 2007; 105:404-8
[0221] 6. Goff B A, Sainz de la Cuesta R, Muntz H G, Fleischhacker D, Ek M, Rice L W, Nikrui N, Tamimi H K, Cain J M, Greer B E, Fuller A F, Jr. Gynecol Oncol Clear cell carcinoma of the ovary: a distinct histologic type with poor prognosis and resistance to platinum-based chemotherapy in stage III disease 1996; 60:412-7
[0222] 7. Sugiyama T, Kamura T, Kigawa J, Terakawa N, Kikuchi Y, Kita T, Suzuki M, Sato I, Taguchi K. Cancer Clinical characteristics of clear cell carcinoma of the ovary: a distinct histologic type with poor prognosis and resistance to platinum-based chemotherapy 2000; 88:2584-9
[0223] 8. Press J Z, De Luca A, Boyd N, Young S, Troussard A, Ridge Y, Kaurah P, Kalloger S E, Blood K A, Smith M, Spellman P T, Wang Y, Miller D M, Horsman D, Faham M, Gilks C B, Gray J, Huntsman D G. BMC Cancer Ovarian carcinomas with genetic and epigenetic BRCA1 loss have distinct molecular abnormalities 2008; 8:17
[0224] 9. Gilks C B. J Oncol Molecular abnormalities in ovarian cancer subtypes other than high-grade serous carcinoma 2010; epub ahead of print
[0225] 10. Gilks C B, Ionescu D N, Kalloger S E, Kobel M, Irving J, Clarke B, Santos J, Le N, Moravan V, Swenerton K. Hum Pathol Tumor cell type can be reproducibly diagnosed and is of independent prognostic significance in patients with maximally debulked ovarian carcinoma 2008; 39:1239-51
[0226] 11. Leitao M M, Jr., Boyd J, Hummer A, Olvera N, Arroyo C D, Venkatraman E, Baergen R N, Dizon D S, Barakat R R, Soslow R A. Am J Surg Pathol Clinicopathologic analysis of early-stage sporadic ovarian carcinoma 2004; 28:147-59
[0227] 12. Pectasides D, Pectasides E, Psyrri A, Economopoulos T. Oncologist Treatment issues in clear cell carcinoma of the ovary: a different entity? 2006; 11:1089-94
[0228] 13. Tavassoli F A, Devilee P. World Health Organization of Tumours: Pathology and genetics of tumours of the breast and female genital organs. Lyon: IARCpress; 2003.
[0229] 14. Kobel M, Kalloger S E, Carrick J, Huntsman D, Asad H, Oliva E, Ewanowich C A, Soslow R A, Gilks C B. Am J Surg Pathol A limited panel of immunomarkers can reliably distinguish between clear cell and high-grade serous carcinoma of the ovary 2009; 33:14-21
[0230] 15. Kuo K T, Mao T L, Jones S, Veras E, Ayhan A, Wang T L, Glas R, Slamon D, Velculescu V E, Kuman R J, Shih Ie M. Am J Pathol Frequent activating mutations of PIK3CA in ovarian clear cell carcinoma 2009; 174:1597-601
[0231] 16. Campbell I G, Russell S E, Choong D Y, Montgomery K G, Ciavarella M L, Hooi C S, Cristiano B E, Pearson R B, Phillips W A. Cancer Res Mutation of the PIK3CA gene in ovarian and breast cancer 2004; 64:7678-81
[0232] 17. Kolasa I K, Rembiszewska A, Felisiak A, Ziolkowska-Seta I, Murawska M, Moes J, Timorek A, Dansonka-Mieszkowska A, Kupryjanczyk J. Cancer Biol Ther PIK3CA amplification associates with resistance to chemotherapy in ovarian cancer patients 2009; 8:21-6
[0233] 18. Wang Y, Helland A, Holm R, Kristensen G B, Borresen-Dale A L. Hum Mutat PIK3CA mutations in advanced ovarian carcinomas 2005; 25:322
[0234] 19. Willner J, Wurz K, Allison K H, Galic V, Garcia R L, Goff B A, Swisher E M. Hum Pathol Alternate molecular genetic pathways in ovarian carcinomas of common histological types 2007; 38:607-13
[0235] 20. Kurman R J, Shih Ie M. Int J Gynecol Pathol Pathogenesis of ovarian cancer: lessons from morphology and molecular biology and their clinical implications 2008; 27:151-60
[0236] 21. Scully R E, Young R H, Clement P B. Tumors of the ovary, maldeveloped gonads, fallopian tube, and broad ligament 1998:141
[0237] 22. Yamamoto S, Tsuda H, Suzuki K, Takano M, Tamai S, Matsubara O. Virchows Arch An allelotype analysis indicating the presence of two distinct ovarian clear-cell carcinogenic pathways: endometriosis-associated pathway vs. clear-cell adenofibroma-associated pathway 2009; 455:261-70
[0238] 23. Yamamoto S, Tsuda H, Takano M, Hase K, Tamai S, Matsubara O. J Pathol Clear-cell adenofibroma can be a clonal precursor for clear-cell adenocarcinoma of the ovary: a possible alternative ovarian clear-cell carcinogenic pathway 2008; 216:103-10
[0239] 24. Aparicio S A, Huntsman D G. J Pathol Does massively parallel DNA resequencing signify the end of histopathology as we know it?; 220:307-15
[0240] 25. Shah S P, Morin R D, Khattra J, Prentice L, Pugh T, Burleigh A, Delaney A, Gelmon K, Guliany R, Senz J, Steidl C, Holt R A, Jones S, Sun M, Leung G, Moore R, Severson T, Taylor G A, Teschendorff A E, Tse K, Turashvili G, Varhol R, Warren R L, Watson P, Zhao Y, Caldas C, Huntsman D, Hirst M, Marra M A, Aparicio S, Nature Mutational evolution in a lobular breast tumour profiled at single nucleotide resolution 2009; 461:809-13
[0241] 26. Reisman D, Glaros S, Thompson E A. Oncogene The SWI/SNF complex and cancer 2009; 28:1653-68
[0242] 27. Sif S, Saurin A J, Imbalzano A N, Kingston R E. Genes Dev Purification and characterization of mSin3A-containing Brg1 and hBrm chromatin remodeling complexes 2001; 15:603-18
[0243] 28. Wang W, Xue Y, Zhou S, Kuo A, Cairns B R, Crabtree G R. Genes Dev Diversity and specialization of mammalian SWI/SNF complexes 1996; 10:2117-30
[0244] 29. Wang X, Nagl N G, Wilsker D, Van Scoy M, Pacchione S, Yaciuk P, Dallas P B, Moran E. Biochem J Two related ARID family proteins are alternative subunits of human SWI/SNF complexes 2004; 383:319-25
[0245] 30. Inoue H, Furukawa T, Giannakopoulos S, Zhou S, King D S, Tanese N. J Biol Chem Largest subunits of the human SWI/SNF chromatin-remodeling complex promote transcriptional activation by steroid hormone receptors 2002; 277:41674-85
[0246] 31. Trotter K W, Fan H Y, Ivey M L, Kingston R E, Archer T K. Mol Cell Biol The HSA domain of BRG1 mediates critical interactions required for glucocorticoid receptor-dependent transcriptional activation in vivo 2008; 28:1413-26
[0247] 32. Nie Z, Xue Y, Yang D, Zhou S, Deroo B J, Archer T K, Wang W. Mol Cell Biol A specificity and targeting subunit of a human SWI/SNF family-related chromatin-remodeling complex 2000; 20:8879-88
[0248] 33. Maher C A, Kumar-Sinha C, Cao X, Kalyana-Sundaram S, Han B, Jing X, Sam L, Barrette T, Palanisamy N, Chinnaiyan A M. Nature Transcriptome sequencing to detect gene fusions in cancer 2009; 458:97-101
[0249] 34. Maher C A, Palanisamy N, Brenner J C, Cao X, Kalyana-Sundaram S, Luo S, Khrebtukova I, Barrette T R, Grasso C, Yu J, Lonigro R J, Schroth G, Kumar-Sinha C, Chinnaiyan A M. Proc Natl Acad Sci USA Chimeric transcript discovery by paired-end transcriptome sequencing 2009; 106:12353-8
[0250] 35. Goya R, Sun M G, Morin R D, Leung G, Ha G, Wiegand K C, Senz J, Crisan A, Marra M A, Hirst M, Huntsman D, Murphy K P, Aparicio S, Shah S P. Bioinformatics SNVMix: predicting single nucleotide variants from next generation sequencing of tumors 2010; 26:730-6
[0251] 36. Press J Z, Kenyon J A, Xue H, Miller M A, De Luca A, Miller D M, Huntsman D G, Gilks C B, McAlpine J N, Wang Y Z. Gynecol Oncol Xenografts of primary human gynecological tumors grown under the renal capsule of NOD/SCID mice show genetic stability during serial transplantation and respond to cytotoxic chemotherapy 2008; 110:256-64
[0252] 37. Bengtsson H, Ray A, Spellman P, Speed T P. A single-sample method for normalizing and combining full-resolution copy numbers from multiple platforms, labs and analysis methods. Bioinformatics 2009; 25:861-7
[0253] 38. Conrad D F, Pinto D, Redon R, et al. Origins and functional impact of copy number variation in the human genome. Nature; 464:704-12
[0254] 39. Rozen S, Skaletsky H. Primer3 on the WWW for general users and for biologist programmers. Methods Mol Biol 2000; 132:365-86
[0255] 40. Hochberg Y, Benjamin Y. More powerful procedures for multiple significance testing. Stat Med 1990; 9:811-8
[0256] 41. Dagan T, Talmor Y, Graur D. Ratios of radical to conservative amino acid replacement are affected by mutational and compositional factors and may not be indicative of positive Darwinian selection. Mol Biol Evol 2002; 19:1022-5
[0257] 42. Makretsov N, He M, Hayes M, et al. A fluorescence in situ hybridization study of ETV6-NTRK3 fusion gene in secretory breast carcinoma. Genes Chromosomes Cancer 2004; 40:152-7
[0258] 43. Chang Y F, Imam J S, Wilkinson M F. The nonsense-mediated decay RNA surveillance pathway. Annu REv Biochem 2007; 76:51-74
[0259] 44. Ness R B. Endometriosis and ovarian cancer: thoughts on shared pathophysiology. Am J Obstet Gynecol 2003; 189:280-94
[0260] 45. Vigano P, Somigliana E, Chiodo I, Abbiati A, Vercellini P. Molecular mechanisms and biological plausibility underling the malignant transformation of endometriosis: a critical analysis. Hum Reprod Update 2006; 12:77-89
[0261] 46. Alkushi A, Clarke B A, Akbari M, et al. Identification of prognostically relevant and reproducible subsets of endometrial adenocarcinoma based on clustering analysis of immunostaining data. Mod Pathol 2007; 20: 1156-1165
[0262] 47. Wiegand K C, Shah S P, Al-Agha O M, et al. ARID1A mutations in endometriosis-associated ovarian carcinomas. N Engl J Med 2010; 363: 1532-1543
[0263] 48. Gao X, Tate P, Hu P, Tjian R, Skarnes W C, Wang Z. Proc Natl Acad Sci USA ES cell pluripotency and germ-layer formation require the SWI/SNF chromatin remodeling component BAF250a 2008; 105:6656-61
[0264] 49. Weissman B, Knudsen K E. Cancer Res Hijacking the chromatin remodeling machinery: impact of SWI/SNF perturbations in cancer 2009; 69:8223-30
[0265] 50. Kobel M, Xu H, Bourne P A, Spaulding B O, Shih Ie M, Mao T L, Soslow R A, Ewanowich C A, Kalloger S E, Mehl E, Lee C H, Huntsman D, Gilks C B. Mod Pathol IGF2BP3 (IMP3) expression is a marker of unfavorable prognosis in ovarian carcinoma of clear cell subtype 2009; 22:469-75
[0266] 51. Bau S, Schracke N, Kranzle M, Wu H, Stahler P F, Hoheisel J D, Beier M, Summerer D. Anal Bioanal Chem Targeted next-generation sequencing by specific capture of multiple genomic loci using low-volume microfluidic DNA arrays 2009; 393:171-5
[0267] 52. Nagl N G, Jr., Patsialou A, Haines D S, Dallas P B, Beck G R, Jr., Moran E. Cancer Res The p270 (ARID1A/SMARCF1) subunit of mammalian SWI/SNF-related complexes is essential for normal cell cycle arrest 2005; 65:9236-44
[0268] 53. Choi J H, Choi K C, Auersperg N, Leung P C. Endocr Relat Cancer Differential regulation of two forms of gonadotropin-releasing hormone messenger ribonucleic acid by gonadotropins in human immortalized ovarian surface epithelium and ovarian cancer cells 2006; 13:641-51
[0269] 54. Franken N A, Rodermond H M, Stap J, Haveman J, van Bree C. Nat Protoc Clonogenic assay of cells in vitro 2006; 1:2315-9
[0270] 55. Nagl N G, Jr., Wang X, Patsialou A, Van Scoy M, Moran E. Embo J Distinct mammalian SWI/SNF chromatin remodeling complexes with opposing roles in cell-cycle control 2007; 26:752-63
[0271] 56. Ryme J, Asp P, Bohm S, Cavellan E, Farrants A K. J Cell Biochem Variations in the composition of mammalian SWI/SNF chromatin remodelling complexes 2009; 108:565-76
[0272] 57. Ho L, Ronan J L, Wu J, Staahl B T, Chen L, Kuo A, Lessard J, Nesvizhskii A I, Ranish J, Crabtree G R. Proc Natl Acad Sci USA An embryonic stem cell chromatin remodeling complex, esBAF, is essential for embryonic stem cell self-renewal and pluripotency 2009; 106:5181-6
[0273] 58. Lessard J, Wu J I, Ranish J A, Wan M, Winslow M M, Staahl B T, Wu H, Aebersold R, Graef I A, Crabtree G R. Neuron An essential switch in subunit composition of a chromatin remodeling complex during neural development 2007; 55:201-15
[0274] 59. Woo C J, Kharchenko P V, Daheron L, Park P J, Kingston R E. Cell A region of the human HOXD cluster that confers polycomb-group responsiveness; 140:99-110
[0275] 60. Tse R, Marroquin B A, Dorscheid D R, White S R. Am J Physiol Lung Cell Mol Physiol Beta-adrenergic agonists inhibit corticosteroid-induced apoptosis of airway epithelial cells 2003; 285:L393-404
[0276] 61. Robertson G, Hirst M, Bainbridge M, Bilenky M, Zhao Y, Zeng T, Euskirchen G, Bernier B, Varhol R, Delaney A, Thiessen N, Griffith O L, He A, Marra M, Snyder M, Jones S, Nat Methods Genome-wide profiles of STAT1 DNA association using chromatin immunoprecipitation and massively parallel sequencing 2007; 4:651-7
[0277] 62. Li H, Ruan J, Durbin R. Genome Res Mapping short DNA sequencing reads and calling variants using mapping quality scores 2008; 18:1851-8
[0278] 63. Fejes A P, Robertson G, Bilenky M, Varhol R, Bainbridge M, Jones SJ. Bioinformatics FindPeaks 3.1: a tool for identifying areas of enrichment from massively parallel short-read sequencing technology 2008; 24:1729-30
[0279] 64. Bailey T L, Boden M, Buske F A, Frith M, Grant C E, Clementi L, Ren J, Li W W, Noble W S. Nucleic Acids Res MEME SUITE: tools for motif discovery and searching 2009; 37: W202-8
[0280] 65. Robinson M D, McCarthy D J, Smyth G K. Bioinformatics edgeR: a Bioconductor package for differential expression analysis of digital gene expression data; 26:139-40
[0281] 66. Li X S, Trojer P, Matsumura T, Treisman J E, Tanese N. Mol Cell Biol Mammalian SWI/SNF-A subunit BAF250/ARID1 is an E3 ubiquitin ligase that targets histone H2B; epub ahead of print
[0282] 67. Farmer H, McCabe N, Lord C J, Tutt A N, Johnson D A, Richardson T B, Santarosa M, Dillon K J, Hickson I, Knights C, Martin N M, Jackson S P, Smith G C, Ashworth A. Nature Targeting the DNA repair defect in BRCA mutant cells as a therapeutic strategy 2005; 434:917-21
[0283] 68. Bryant H E, Schultz N, Thomas H D, Parker K M, Flower D, Lopez E, Kyle S, Meuth M, Curtin N J, Helleday T. Nature Specific killing of BRCA2-deficient tumours with inhibitors of poly(ADP-ribose) polymerase 2005; 434:913-7
[0284] 69. Poon S S, Wong J T, Saunders D N, Ma Q C, McKinney S, Fee J, Aparicio S A. Cytometry A Intensity calibration and automated cell cycle gating for high-throughput image-based siRNA screens of mammalian cells 2008; 73:904-17
[0285] 70. Ghosh D, Chinnaiyan A M. Funct Integr Genomics Covariate adjustment in the analysis of microarray data from clinical studies 2005; 5:18-27
[0286] 71. Benjamini Y, Drai D, Elmer G, Kafkafi N, Golani I Behav Brain Res Controlling the false discovery rate in behavior genetics research 2001; 125:279-84
[0287] 72. Ghosh D, Chinnaiyan A M. Biom J Empirical Bayes identification [correction of identication] of tumor progression genes from microarray data 2007; 49:68-77

1. A method of using ARID1A or absence of BAF250a expression as a biomarker to determine the risk that endometriosis will progress to ovarian carcinoma, to provide a prognosis for a subject suffering from ovarian carcinoma, and/or to determine whether an ovarian carcinoma is likely to respond to standard chemotherapeutic agents, the method comprising obtaining a sample from a patient and assaying the sample for mutations in ARID1A or for expression of BAF250a.

2. (canceled)

3. (canceled)

4. A method as defined in claim 1, wherein the standard chemotherapeutic agents comprise platinum or taxane therapies.

5. (canceled)

6. A method as defined in claim 1 for determining whether endometriosis of a subject is likely to progress to carcinoma, for determining the prognosis for a subject suffering from carcinoma, and/or for determining whether standard chemotherapeutic agents are likely to be effective in treating carcinoma, the method comprising the steps of:
obtaining a tissue sample of the endometriosis or carcinoma; and
assaying the sample for expression of BAF250a,
wherein the absence of expression of BAF250a indicates a likelihood that the endometriosis will progress to carcinoma, indicates a poor prognosis, or indicates that the standard chemotherapeutic agents are not likely to be effective.

7. (canceled)

8. (canceled)

9. A method as defined in claim 6, wherein the step of assaying the sample for expression of BAF250a comprises immunohistochemistry using an antibody specific for BAF250a.

10. A method as defined in claim 1 for determining whether endometriosis of a subject is likely to progress to carcinoma, for determining a prognosis for a subject suffering from carcinoma, and/or for determining whether standard chemotherapeutic agents are likely to be effective in treating carcinoma, the method comprising the steps of:
obtaining a tissue sample of the endometriosis or carcinoma; and
assaying for the presence of mutations in the ARID1A gene in the sample,
wherein the presence of a significant mutation in the ARID1A gene indicates a likelihood that the endometriosis will progress to carcinoma, indicates a poor prognosis, or indicates that the standard chemotherapeutic agents are not likely to be effective.

11. (canceled)

12. (canceled)

13. A method as defined in claim 10, wherein the step of assaying for the presence of mutations in the ARID1A gene comprises sequencing the ARID1A gene or the mRNA produced from the ARID1A gene.

14. (canceled)

15. A method as defined in claim 10, wherein the step of assaying for the presence of mutations in the ARID1A gene comprises using a mutation detection method, and wherein the mutation detection method optionally comprises using a PCR-based detection method or fluorescence in-situ hybridization.

16. (canceled)

17. A method as defined in claim 10, wherein the mutation in the ARID1A gene comprises a nonsense mutation or a significant missense mutation.

18. A method as defined in claim 10, wherein the mutation in the ARID1A gene comprises one of the mutations set forth in SEQ ID NO.:2 through SEQ ID NO.:122.

19. A method for determining a likelihood that endometriosis will progress or transform into carcinoma, for determining a prognosis of a subject suffering from carcinoma, or for determining the likely effectiveness of standard therapeutic agents in treating a carcinoma, the method comprising the steps of:
obtaining a tissue sample of the endometriosis or carcinoma; and
assaying the sample for expression of proteins that are components of the SWI/SNF complex and/or assaying the sample for the presence of mutations in one or more of the genes that encode proteins that are components of the SWI/SNF complex;
wherein an absence of expression of at least one of the proteins that are components of the SWI/SNF complex or a significant mutation in at least one of the genes that encode proteins that are components of the SWI/SNF complex indicates a risk that the endometriosis will progress or transform into carcinoma, a poor prognosis, or that standard therapeutic agents are not likely to be effective in treating the carcinoma, wherein the proteins that are components of the SWI/SNF complex optionally comprise one or more of BAF250b, BAF200, BRM, BAF155, BAF60a, BAF60b, BAF60c, BAF57, BAF53a, BAF53b, BAF47, BRG1, BAF180 or BAF170.

20. (canceled)

21. (canceled)

22. A method as defined in claim 19, wherein the step of assaying the sample for expression of proteins that are components of the SWI/SNF complex comprises immunohistochemistry.

23. (canceled)

24. A method as defined in claim 19, wherein the step of assaying the sample for the presence of mutations comprises sequencing the one or more genes in the sample, using a PCR-based detection method, or using fluorescence in-situ hybridization.

25. (canceled)

26. A method as defined in claim 19, wherein the mutation in the one or more genes comprises a nonsense mutation or a significant missense mutation, and wherein the one or more genes optionally comprises ARID1B, ARID2, SMARCA2, SMARCC1, SMARCD1, SMARCD2, SMARCD3, SMARCE1, ACTL6A, ACTL6B, SCMARCB1, SMARC4, PBRM1, or SMARC22.

27. (canceled)

28. (canceled)

29. A method as defined in claim 26, wherein the mutation in the one or more genes comprises one of the mutations in SMARCA4, PBRM1, or SMARCC2 set forth in SEQ ID NO.:123 or SEQ ID NO.:124.

30. A method as defined in claim 1, wherein the carcinoma is clear cell carcinoma of the ovary, endometrioid carcinoma, or uterine carcinoma.

31. (canceled)

32. A method for screening for genes necessary for the survival of cells having one or more mutations in the ARID1A gene, the method comprising the steps of:
providing a cell line having a mutation in the ARID1A gene;
conducting a synthetic lethal screen using a gene library; and
identifying genes that are necessary to the survival of the cell line having the mutation in the ARID1A gene.

33. A method as defined in claim 32, wherein the mutation in the ARID1A gene comprises one of the mutations set forth in SEQ ID NO.:1 through SEQ ID NO.:122 or one of the mutant forms of BAF250 encoded by SEQ ID NO.:1 through SEQ ID NO.:122, or ARID1A-ΔL2007.

34. (canceled)

35. (canceled)

36. A method for screening for genes necessary for the survival of cells having one or more mutations in genes that encode proteins that are components of the SWI/SNF complex, the method comprising the steps of:
providing a cell line having a mutation in the one or more genes;
conducting a synthetic lethal screen using a gene library; and
identifying genes that are necessary to the survival of the cell line having the mutation in the one or more genes, wherein the one or more genes optionally comprise ARID1B, ARID2, SMARCA2, SMARCC1, SMARCD1, SMARCD2, SMARCD3, SMARCE1, ACTL6A, ACTL6B, SCMARCB1, SMARCA4, PBRM1, or SMARCC2.

37. (canceled)

38. (canceled)

39. A method as defined in claim 36, wherein the mutation in the one or more genes comprises one of the mutations in SMARCA4, PBRM1, or SMARCC2 set forth in SEQ ID NO.:123 or SEQ ID NO.:124, or wherein the mutation in the one or more genes encodes one of the mutant forms of BRG1, BAF180, or BAF170 encoded by SEQ ID NO.:123 or SEQ ID NO.:124.

40. (canceled)

41. A method as defined in claim 32, wherein the gene library used in the synthetic lethal screen comprises the Hannon/Elledge lenti-shRNA human library or the Dharmacon siGenome pool.

42. A method of developing a therapeutic agent useful in the treatment of cancer comprising screening for agents that inhibit the expression of any of the genes identified by the method as defined in claim 32, or that inhibit the function of a protein product encoded by any of the genes identified by the method as defined in claim 32.

43. (canceled)

44. A method of treating clear-cell carcinoma of the ovary, endometrioid carcinoma, or uterine carcinoma comprising administering a therapeutic amount of an agent identified by the method defined in claim 42 to a patient.

The application's sequence listing, which the Patent Office published only in electronic form, follows.

SEQUENCE LISTING (125 sequences)

SEQ ID NO: 1 - DNA, 8585 bp, Homo sapiens
cagaaagcggagagtcacagcggggccaggccctggggagcggagcctccaccgcccccctcattcccaggcaagggcttggggggaatgagccgggagagccgggtcccgagcctacagagccgggagcagctgagccgccggcgcctcggccgccgccgccgcctcctcctcctccgccgccgccagcccggagcctgagccggcggggcgggggggagaggagcgagcgcagcgcagcagcggagccccgcgaggcccgcccgggcgggtggggagggcagcccgggggactgggccccggggcggggtgggagggggggagaagacgaagacagggccgggtctctccgcggacgagacagcggggatcatggccgcgcaggtcgcccccgccgccgccagcagcctgggcaacccgccgccgccgccgccctcggagctgaagaaagccgagcagcagcagcgggaggaggcggggggcgaggcggcggcggcggcagcggccgagcgcggggaaatgaaggcagccgccgggcaggaaagcgagggccccgccgtggggccgccgcagccgctgggaaaggagctgcaggacggggccgagagcaatgggggtggcggcggcggcggagccggcagcggcggcgggcccggcgcggagccggacctgaagaactcgaacgggaacgcgggccctaggcccgccctgaacaataacctcacggagccgcccggcggcggcggtggcggcagcagcgatggggtgggggcgcctcctcactcagccgcggccgccttgccgcccccagcctacggcttcgggcaaccctacggccggagcccgtctgccgtcgccgccgccgcggccgccgtcttccaccaacaacatggcggacaacaaagccctggcctggcagcgctgcagagcggcggcggcgggggcctggagccctacgcggggccccagcagaactctcacgaccacggcttccccaaccaccagtacaactcctactaccccaaccgcagcgcctaccccccgcccgccccggcctacgcgctgagctccccgagaggtggcactccgggctccggcgcggcggcggctgccggctccaagccgcctccctcctccagcgcctccgcctcctcgtcgtcttcgtccttcgctcagcagcgcttcggggccatggggggaggcggcccctccgcggccggcgggggaactccccagcccaccgccacccccaccctcaaccaactgctcacgtcgcccagctcggcccggggctaccagggctaccccgggggcgactacagtggcgggccccaggacgggggcgccggcaagggcccggcggacatggcctcgcagtgttggggggctgcggcggcggcagctgcggcggcggccgcctcgggaggggcccaacaaaggagccaccacgcgcccatgagccccgggagcagcggcggcggggggcagccgctcgcccggacccctcagccatccagtccaatggatcagatgggcaagatgagacctcagccatatggcgggactaacccatactcgcagcaacagggacctccgtcaggaccgcagcaaggacatgggtacccagggcagccatacgggtcccagaccccgcagcggtacccgatgaccatgcagggccgggcgcagagtgccatgggcggcctctcttatacacagcagattcctccttatggacaacaaggccccagcgggtatggtcaacagggccagactccatattacaaccagcaaagtcctcaccctcagcagcagcagccaccctactcccagcaaccaccgtcccagacccctcatgcccaaccttcgtatcagcagcagccacagtctcaaccaccacagctccagtcctctcagcctccatactcccagcagccatcccagcctccacatcagcagtccccggctccatacccctcccagcagtcgacgacacagcagcacccccagagccagcccccctactcacagccacaggctcagtctccttaccagcagcagcaacctcagcagccagcaccctcgacgctctcccagcaggctgcgtatcctcagccccagtctcagcagtcccagcaaactgcctattcccagcagcgcttccctccaccgcaggagctatctcaagattcatttgggtctcaggcatcctcagccccctcaatgacctccagtaagggagggcaagaagatatgaacctgagccttcagtcaagaccctccagcttgcctgatctatctggttcaatagatgacctccccatggggacagaaggagctctgagtcctggagtgagcacatcagggatttccagcagccaaggagagcagagtaatccagctcagtctcctttctctcctcatacctcccctcacctgcctggcatccgaggcccttccccgtcccctgttggctctcccgccagtgttgctcagtctcgctcaggaccactctcgcctgctgcagtgccaggcaaccagatgccacctcggccacccagtggccagtcggacagcatcatgcatccttccatgaaccaatcaagcattgcccaagatcgaggttatatgcagaggaacccccagatgccccagtacagttccccccagcccggctcagccttatctccgcgtcagccttccggaggacagatacacacaggcatgggctcctaccagcagaactccatggggagctatggtccccaggggggtcagtatggcccacaaggtggctaccccaggcagccaaactataatgccttgcccaatgccaactaccccagtgcaggcatggctggaggcataaaccccatgggtgccggaggtcaaatgcatggacagcctggcatcccaccttatggcacactccctccagggaggatgagtcacgcctccatgggcaaccggccttatggccctaacatggccaatatgccacctcaggttgggtcagggatgtgtcccccaccagggggcatgaaccggaaaacccaagaaactgctgtcgccatgcatgttgctgccaactctatccaaaacaggccgccaggctaccccaatatgaatcaagggggcatgatgggaactggacctccttatggacaagggattaatagtatggctggcatgatcaaccctcagggacccccatattccatgggtggaaccatggccaacaattctgcagggatggcagccagcccagagatgatgggccttggggatgtaaagttaactccagccaccaaaatgaacaacaaggcagatgggacacccaagacagaatccaaatccaagaaatccagttcttctactacaaccaatgagaagatcaccaagttgtatgagctgggtggtgagcctgagaggaagatgtgggtggaccgttatctggccttcactgaggagaaggccatgggcatgacaaatctgcctgctgtgggtaggaaacctctggacctctatcgcctctatgtgtctgtgaaggagattggtggattgactcaggtcaacaagaacaaaaaatggcgggaacttgcaaccaacctcaatgtgggcacatcaagcagtgctgccagctccttgaaaaagcagtatatccagtgtctctatgcctttgaatgcaagattgaacggggagaagaccctcccccagacatctttgcagctgctgattccaagaagtcccagcccaagatccagcctccctctcctgcgggatcaggatctatgcaggggccccagactccccagtcaaccagcagttccatggcagaaggaggagacttaaagccaccaactccagcatccacaccacacagtcagatccccccattgccaggcatgagcaggagcaattcagttgggatccaggatgcctttaatgatggaagtgactccacattccagaagcggaattccatgactccaaaccctgggtatcagcccagtatgaatacctctgacatgatggggcgcatgtcctatgagccaaataaggatccttatggcagcatgaggaaagctccagggagtgatcccttcatgtcctcagggcagggccccaacggcgggatgggtgacccctacagtcgtgctgccggccctgggctaggaaatgtggcgatgggaccacgacagcactatccctatggaggtccttatgacagagtgaggacggagcctggaatagggcctgagggaaacatgagcactggggccccacagccgaatctcatgccttccaacccagactcggggatgtattctcctagccgctaccccccgcagcagcagcagcagcagcagcaacgacatgattcctatggcaatcagttctccacccaaggcaccccttctggcagccccttccccagccagcagactacaatgtatcaacagcaacagcagaattacaagcggccaatggatggcacatatggccctcctgccaagcggcacgaaggggagatgtacagcgtgccatacagcactgggcaggggcagcctcagcagcagcagttgcccccagcccagccccagcctgccagccagcaacaagctgcccagccttcccctcagcaagatgtatacaaccagtatggcaatgcctatcctgccactgccacagctgctactgagcgccgaccagcaggcggcccccagaaccaatttccattccagtttggccgagaccgtgtctctgcaccccctggcaccaatgcccagcaaaacatgccaccacaaatgatgggcggccccatacaggcatcagctgaggttgctcagcaaggcaccatgtggcaggggcgtaatgacatgacctataattatgccaacaggcagagcacgggctctgccccccagggccccgcctatcatggcgtgaaccgaacagatgaaatgctgcacacagatcagagggccaaccacgaaggctcgtggccttcccatggcacacgccagcccccatatggtccctctgcccctgtgccccccatgacaaggccccctccatctaactaccagcccccaccaagcatgcagaatcacattcctcaggtatccagccctgctcccctgccccggccaatggagaaccgcacctctcctagcaagtctccattcctgcactctgggatgaaaatgcagaaggcaggtcccccagtacctgcctcgcacatagcacctgcccctgtgcagccccccatgattcggcgggatatcaccttcccacctggctctgttgaagccacacagcctgtgttgaagcagaggaggcggctcacaatgaaagacattggaaccccggaggcatggcgggtaatgatgtccctcaagtctggtctcctggcagagagcacatgggcattagataccatcaacatcctgctgtatgatgacaacagcatcatgaccttcaacctcagtcagctcccagggttgctagagctccttgtagaatatttccgacgatgcctgattgagatctttggcattttaaaggagtatgaggtgggtgacccaggacagagaacgctactggatcctgggaggttcagcaaggtgtctagtccagctcccatggagggtggggaagaagaagaagaacttctaggtcctaaactagaagaggaagaagaagaggaagtagttgaaaatgatgaggagatagccttttcaggcaaggacaagccagcttcagagaatagtgaggagaagctgatcagtaagtttgacaagcttccagtaaagatcgtacagaagaatgatccatttgtggtggactgctcagataagcttgggcgtgtgcaggagtttgacagtggcctgctgcactggcggattggtgggggggacaccactgagcatatccagacccacttcgagagcaagacagagctgctgccttcccggcctcacgcaccctgcccaccagcccctcggaagcatgtgacaacagcagagggtacaccagggacaacagaccaggaggggcccccacctgatggacctccagaaaaacggatcacagccactatggatgacatgttgtctactcggtctagcaccttgaccgaggatggagctaagagttcagaggccatcaaggagagcagcaagtttccatttggcattagcccagcacagagccaccggaacatcaagatcctagaggacgaaccccacagtaaggatgagaccccactgtgtacccttctggactggcaggattctcttgccaagcgctgcgtctgtgtgtccaataccattcgaagcctgtcatttgtgccaggcaatgactttgagatgtccaaacacccagggctgctgctcatcctgggcaagctgatcctgctgcaccacaagcacccagaacggaagcaggcaccactaacttatgaaaaggaggaggaacaggaccaaggggtgagctgcaacaaagtggagtggtggtgggactgcttggagatgctccgggaaaacaccttggttacactcgccaacatctcggggcagttggacctatctccataccccgagagcatttgcctgcctgtcctggacggactcctacactgggcagtttgcccttcagctgaagcccaggaccccttttccaccctgggccccaatgccgtcctttccccgcagagactggtcttggaaaccctcagcaaactcagcatccaggacaacaatgtggacctgattctggccacaccccccttcagccgcctggagaagttgtatagcactatggtgcgcttcctcagtgaccgaaagaacccggtgtgccgggagatggctgtggtactgctggccaacctggctcagggggacagcctggcagctcgtgccattgcagtgcagaagggcagtatcggcaacctcctgggcttcctagaggacagccttgccgccacacagttccagcagagccaggccagcctcctccacatgcagaacccaccctttgagccaactagtgtggacatgatgcggcgggctgcccgcgcgctgcttgccttggccaaggtggacgagaaccactcagagtttactctgtacgaatcacggctgttggacatctcggtatcaccgttgatgaactcattggtttcacaagtcatttgtgatgtactgtttttgattggccagtcatgacagccgtgggacacctcccccccccgtgtgtgtgtgcgtgtgtggagaacttagaaactgactgttgccctttatttatgcaaaaccacctcagaatccagtttaccctgtgctgtccagcttctcccttgggaaaaagtctctcctgtttctctctcctccttccacctcccctccctccatcacctcacgcctttctgttccttgtcctcaccttactcccctcaggaccctaccccaccctctttgaaaagacaaagctctgcctacatagaagactttttttattttaaccaaagttactgttgtttacagtgagtttggggaaaaaaaataaaataaaaatggctttcccagtccttgcatcaacgggatgccacatttcataactgtttttaatggtaaaaaaaaaaaaaaaaaatacaaaaaaaaattctgaaggacaaaaaaggtgactgctgaactgtgtgtggtttattgttgtacattcacaatcttgcaggagccaagaagttcgcagttgtgaacagaccctgttcactggagaggcctgtgcagtagagtgtagaccctttcatgtactgtactgtacacctgatactgtaaacatactgtaataataatgtctcacatggaaacagaaaacgctgggtcagcagcaagctgtagtttttaaaaatgtttttagttaaacgttgaggagaaaaaaaaaaaaggcttttcccccaaagtatcatgtgtgaacctacaacaccctgacctctttctctcctccttgattgtatgaataaccctgagatcacctcttagaactggttttaacctttagctgcagcggctacgctgccacgtgtgtatatatatgacgttgtacattgcacatacccttggatccccacagtttggtcctcctcccagctacccctttatagtatgacgagttaacaagttggtgacctgcacaaagcgagacacagctatttaatctcttgccagatatcgcccctcttggtgcgatgctgtacaggtctctgtaaaaagtccttgctgtctcagcagccaatcaacttatagtttatttttttctgggtttttgttttgttttgttttctttctaatcgaggtgtgaaaaagttctaggttcagttgaagttctgatgaagaaacacaattgagattttttcagtgataaaatctgcatatttgtatttcaacaatgtagctaaaacttgatgtaaattcctcctttttttccttttttggcttaatgaatatcatttattcagtatgaaatctttatactatatgttccacgtgttaagaataaatgtacattaaatcttggtaagacttt

SEQ ID NO: 2 - DNA, 8585 bp, Homo sapiens
cagaaagcggagagtcacagcggggccaggccctggggagcggagcctccaccgcccccctcattcccaggcaagggcttggggggaatgagccgggagagccgggtcccgagcctacagagccgggagcagctgagccgccggcgcctcggccgccgccgccgcctcctcctcctccgccgccgccagcccggagcctgagccggcggggcgggggggagaggagcgagcgcagcgcagcagcggagccccgcgaggcccgcccgggcgggtggggagggcagcccgggggactgggccccggggcggggtgggagggggggagaagacgaagacagggccgggtctctccgcggacgagacagcggggatcatggccgcgcaggtcgcccccgccgccgccagcagcctgggcaacccgccgccgccgccgccctcggagctgaagaaagccgagcagcagcagcgggaggaggcggggggcgaggcggcggcggcggcagcggccgagcgcggggaaatgaaggcagccgccgggcaggaaagcgagggccccgccgtggggccgccgcagccgctgggaaaggagctgcaggacggggccgagagcaatgggggtggcggcggcggcggagccggcagcggcggcgggcccggcgcggagccggacctgaagaactcgaacgggaacgcgggccctaggcccgccctgaacaataacctcacggagccgcccggcggcggcggtggcggcagcagcgatggggtgggggcgcctcctcactcagccgcggccgccttgccgcccccagcctacggcttcgggcaaccctacggccggagcccgtctgccgtcgccgccgccgcggccgccgtcttccaccaacaacatggcggacaacaaagccctggcctggcagcgctgcagagcggcggcggcgggggcctggagccctacgcggggccccagcagaactctcacgaccacggcttccccaaccaccagtacaactcctactaccccaaccgcagcgcctaccccccgcccgccccggcctacgcgctgagctccccgagaggtggcactccgggctccggcgcggcggcggctgccggctccaagccgcctccctcctccagcgcctccgcctcctcgtcgtcttcgtccttcgctcagcagcgcttcggggccatggggggaggcggcccctccgcggccggcgggggaactccccagcccaccgccacccccaccctcaaccaactgctcacgtcgcccagctcggcccggggctaccagggctaccccgggggcgactacagtggcgggccccaggacgggggcgccggcaagggcccggcggacatggcctcgcagtgttggggggctgcggcggcggcagctgcggcggcggccgcctcgggaggggcccaacaaaggagccaccacgcgcccatgagccccgggagcagcggcggcggggggcagccgctcgcccggacccctcagccatccagtccaatggatcagatgggcaagatgagacctcagccatatggcgggactaacccatactcgcagcaacagggacctccgtcaggaccgcagcaaggacatgggtacccagggcagccatacgggtcccagaccccgcagcggtacccgatgaccatgcagggccgggcgcagagtgccatgggcggcctctcttatacacagcagattcctccttatggacaacaaggccccagcgggtatggtcaacagggccagactccatattacaaccagcaaagtcctcaccctcagcagcagcagccaccctactcccagcaaccaccgtcccagacccctcatgcccaaccttcgtatcagcagcagccacagtctcaaccaccacagctccagtcctctcagcctccatactcccagcagccatcccagcctccacatcagcagtccccggctccatacccctcccagcagtcgacgacacagcagcacccccagagccagcccccctactcacagccacaggctcagtctccttaccagcagcagcaacctcagcagccagcaccctcgacgctctcccagcaggctgcgtatcctcagccccagtctcagcagtcccagcaaactgcctattcccagcagcgcttccctccaccgcaggagctatctcaagattcatttgggtctcaggcatcctcagccccctcaatgacctccagtaagggagggcaagaagatatgaacctgagccttcagtcaagaccctccagcttgcctgatctatctggttcaatagatgacctccccatggggacagaaggagctctgagtcctggagtgagcacatcagggatttccagcagccaaggagagcagagtaatccagctcagtctcctttctctcctcatacctcccctcacctgcctggcatccgaggcccttccccgtcccctgttggctctcccgccagtgttgctcagtctcgctcaggaccactctcgcctgctgcagtgccaggcaaccagatgccacctcggccacccagtggccagtcggacagcatcatgcatccttccatgaaccaatcaagcattgcccaagatcgaggttatatgcagaggaacccccagatgccccagtacagttccccccagcccggctcagccttatctccgcgtcagccttccggaggacagatacacacaggcatgggctcctaccagcagaactccatggggagctatggtccccaggggggtcagtatggcccacaaggtggctaccccaggcagccaaactataatgccttgcccaatgccaactaccccagtgcaggcatggctggaggcataaaccccatgggtgccggaggtcaaatgcatggacagcctggcatcccaccttatggcacactccctccagggaggatgagtcacgcctccatgggcaaccggccttatggccctaacatggccaatatgccacctcaggttgggtcagggatgtgtcccccaccagggggcatgaaccggaaaacccaagaaactgctgtcgccatgcatgttgctgccaactctatccaaaacaggccgccaggctaccccaatatgaatcaagggggcatgatgggaactggacctccttatggacaagggattaatagtatggctggcatgatcaaccctcagggacccccatattccatgggtggaaccatggccaacaattctgcagggatggcagccagcccagagatgatgggccttggggatgtaaagttaactccagccaccaaaatgaacaacaaggcagatgggacacccaagacagaatccaaatccaagaaatccagttcttctactacaaccaatgagaagatcaccaagttgtatgagctgggtggtgagcctgagaggaagatgtgggtggaccgttatctggccttcactgaggagaaggccatgggcatgacaaatctgcctgctgtgggtaggaaacctctggacctctatcgcctctatgtgtctgtgaaggagattggtggattgactcaggtcaacaagaacaaaaaatggcgggaacttgcaaccaacctcaatgtgggcacatcaagcagtgctgccagctccttgaaaaagcagtatatccagtgtctctatgcctttgaatgcaagattgaacggggagaagaccctcccccagacatctttgcagctgctgattccaagaagtcccagcccaagatccagcctccctctcctgcgggatcaggatctatgcaggggccccagactccccagtcaaccagcagttccatggcagaaggaggagacttaaagccaccaactccagcatccacaccacacagtcagatccccccattgccaggcatgagcaggagcaattcagttgggatccaggatgcctttaatgatggaagtgactccacattccagaagcggaattccatgactccaaaccctgggtatcagcccagtatgaatacctctgacatgatggggcgcatgtcctatgagccaaataaggatccttatggcagcatgaggaaagctccagggagtgatcccttcatgtcctcagggcagggccccaacggcgggatgggtgacccctacagtcgtgctgccggccctgggctaggaaatgtggcgatgggaccacgacagcactatccctatggaggtccttatgacagagtgaggacggagcctggaatagggcctgagggaaacatgagcactggggccccacagccgaatctcatgccttccaacccagactcggggatgtattctcctagccgctaccccccgcagcagcagcagcagcagcagcaacgacatgattcctatggcaatcagttctccacccaaggcaccccttctggcagccccttccccagccagcagactacaatgtatcaacagcaacagcagaattacaagcggccaatggatggcacatatggccctcctgccaagcggcacgaaggggagatgtacagcgtgccatacagcactgggcaggggcagcctcagcagcagcagttgcccccagcccagccccagcctgccagccagcaacaagctgcccagccttcccctcagcaagatgtatacaaccagtatggcaatgcctatcctgccactgccacagctgctactgagcgccgaccagcaggcggcccccagaaccaatttccattccagtttggccgagaccgtgtctctgcaccccctggcaccaatgcccagcaaaacatgccaccacaaatgatgggcggccccatacaggcatcagctgaggttgctcagcaaggcaccatgtggcaggggcgtaatgacatgacctataattatgccaacaggcagagcacgggctctgccccccagggccccgcctatcatggcgtgaaccgaacagatgaaatgctgcacacagatcagagggccaaccacgaaggctcgtggccttcccatggcacacgccagcccccatatggtccctctgcccctgtgccccccatgacaaggccccctccatctaactaccagcccccaccaagcatgcagaatcacattcctcaggtatccagccctgctcccctgccccggccaatggagaaccgcacctctcctagcaagtctccattcctgcactctgggatgaaaatgcagaaggcaggtcccccagtacctgcctcgcacatagcacctgcccctgtgcagccccccatgattcggcgggatatcaccttcccacctggctctgttgaagccacacagcctgtgttgaagcagaggaggcggctcacaatgaaagacattggaaccccggaggcatggcgggtaatgatgtccctcaagtctggtctcctggcagagagcacatgggcattagataccatcaacatcctgctgtatgatgacaacagcatcatgaccttcagcctcagtcagctcccagggttgctagagctccttgtagaatatttccgacgatgcctgattgagatctttggcattttaaaggagtatgaggtgggtgacccaggacagagaacgctactggatcctgggaggttcagcaaggtgtctagtccagctcccatggagggtggggaagaagaagaagaacttctaggtcctaaactagaagaggaagaagaagaggaagtagttgaaaatgatgaggagatagccttttcaggcaaggacaagccagcttcagagaatagtgaggagaagctgatcagtaagtttgacaagcttccagtaaagatcgtacagaagaatgatccatttgtggtggactgctcagataagcttgggcgtgtgcaggagtttgacagtggcctgctgcactggcggattggtgggggggacaccactgagcatatccagacccacttcgagagcaagacagagctgctgccttcccggcctcacgcaccctgcccaccagcccctcggaagcatgtgacaacagcagagggtacaccagggacaacagaccaggaggggcccccacctgatggacctccagaaaaacggatcacagccactatggatgacatgttgtctactcggtctagcaccttgaccgaggatggagctaagagttcagaggccatcaaggagagcagcaagtttccatttggcattagcccagcacagagccaccggaacatcaagatcctagaggacgaaccccacagtaaggatgagaccccactgtgtacccttctggactggcaggattctcttgccaagcgctgcgtctgtgtgtccaataccattcgaagcctgtcatttgtgccaggcaatgactttgagatgtccaaacacccagggctgctgctcatcctgggcaagctgatcctgctgcaccacaagcacccagaacggaagcaggcaccactaacttatgaaaaggaggaggaacaggaccaaggggtgagctgcaacaaagtggagtggtggtgggactgcttggagatgctccgggaaaacaccttggttacactcgccaacatctcggggcagttggacctatctccataccccgagagcatttgcctgcctgtcctggacggactcctacactgggcagtttgcccttcagctgaagcccaggaccccttttccaccctgggccccaatgccgtcctttccccgcagagactggtcttggaaaccctcagcaaactcagcatccaggacaacaatgtggacctgattctggccacaccccccttcagccgcctggagaagttgtatagcactatggtgcgcttcctcagtgaccgaaagaacccggtgtgccgggagatggctgtggtactgctggccaacctggctcagggggacagcctggcagctcgtgccattgcagtgcagaagggcagtatcggcaacctcctgggcttcctagaggacagccttgccgccacacagttccagcagagccaggccagcctcctccacatgcagaacccaccctttgagccaactagtgtggacatgatgcggcgggctgcccgcgcgctgcttgccttggccaaggtggacgagaaccactcagagtttactctgtacgaatcacggctgttggacatctcggtatcaccgttgatgaactcattggtttcacaagtcatttgtgatgtactgtttttgattggccagtcatgacagccgtgggacacctcccccccccgtgtgtgtgtgcgtgtgtggagaacttagaaactgactgttgccctttatttatgcaaaaccacctcagaatccagtttaccctgtgctgtccagcttctcccttgggaaaaagtctctcctgtttctctctcctccttccacctcccctccctccatcacctcacgcctttctgttccttgtcctcaccttactcccctcaggaccctaccccaccctctttgaaaagacaaagctctgcctacatagaagactttttttattttaaccaaagttactgttgtttacagtgagtttggggaaaaaaaataaaataaaaatggctttcccagtccttgcatcaacgggatgccacatttcataactgtttttaatggtaaaaaaaaaaaaaaaaaatacaaaaaaaaattctgaaggacaaaaaaggtgactgctgaactgtgtgtggtttattgttgtacattcacaatcttgcaggagccaagaagttcgcagttgtgaacagaccctgttcactggagaggcctgtgcagtagagtgtagaccctttcatgtactgtactgtacacctgatactgtaaacatactgtaataataatgtctcacatggaaacagaaaacgctgggtcagcagcaagctgtagtttttaaaaatgtttttagttaaacgttgaggagaaaaaaaaaaaaggcttttcccccaaagtatcatgtgtgaacctacaacaccctgacctctttctctcctccttgattgtatgaataaccctgagatcacctcttagaactggttttaacctttagctgcagcggctacgctgccacgtgtgtatatatatgacgttgtacattgcacatacccttggatccccacagtttggtcctcctcccagctacccctttatagtatgacgagttaacaagttggtgacctgcacaaagcgagacacagctatttaatctcttgccagatatcgcccctcttggtgcgatgctgtacaggtctctgtaaaaagtccttgctgtctcagcagccaatcaacttatagtttatttttttctgggtttttgttttgttttgttttctttctaatcgaggtgtgaaaaagttctaggttcagttgaagttctgatgaagaaacacaattgagattttttcagtgataaaatctgcatatttgtatttcaacaatgtagctaaaacttgatgtaaattcctcctttttttccttttttggcttaatgaatatcatttattcagtatgaaatctttatactatatgttccacgtgttaagaataaatgtacattaaatcttggtaagacttt

SEQ ID NO: 3 - DNA, 8586 bp, Homo sapiens
cagaaagcggagagtcacagcggggccaggccctggggagcggagcctccaccgcccccctcattcccaggcaagggcttggggggaatgagccgggagagccgggtcccgagcctacagagccgggagcagctgagccgccggcgcctcggccgccgccgccgcctcctcctcctccgccgccgccagcccggagcctgagccggcggggcgggggggagaggagcgagcgcagcgcagcagcggagccccgcgaggcccgcccgggcgggtggggagggcagcccgggggactgggccccggggcggggtgggagggggggagaagacgaagacagggccgggtctctccgcggacgagacagcggggatcatggccgcgcaggtcgcccccgccgccgccagcagcctgggcaacccgccgccgccgccgccctcggagctgaagaaagccgagcagcagcagcgggaggaggcggggggcgaggcggcggcggcggcagcggccgagcgcggggaaatgaaggcagccgccgggcaggaaagcgagggccccgccgtggggccgccgcagccgctgggaaaggagctgcaggacggggccgagagcaatgggggtggcggcggcggcggagccggcagcggcggcgggcccggcgcggagccggacctgaagaactcgaacgggaacgcgggccctaggcccgccctgaacaataacctcacggagccgcccggcggcggcggtggcggcagcagcgatggggtgggggcgcctcctcactcagccgcggccgccttgccgcccccagcctacggcttcgggcaaccctacggccggagcccgtctgccgtcgccgccgccgcggccgccgtcttccaccaacaacatggcggacaacaaagccctggcctggcagcgctgcagagcggcggcggcgggggcctggagccctacgcggggccccagcagaactctcacgaccacggcttccccaaccaccagtacaactcctactaccccaaccgcagcgcctaccccccgcccgccccggcctacgcgctgagctccccgagaggtggcactccgggctccggcgcggcggcggctgccggctccaagccgcctccctcctccagcgcctccgcctcctcgtcgtcttcgtccttcgctcagcagcgcttcggggccatggggggaggcggcccctccgcggccggcgggggaactccccagcccaccgccacccccaccctcaaccaactgctcacgtcgcccagctcggcccggggctaccagggctaccccgggggcgactacagtggcgggccccaggacgggggcgccggcaagggcccggcggacatggcctcgcagtgttggggggctgcggcggcggcagctgcggcggcggccgcctcgggaggggcccaacaaaggagccaccacgcgcccatgagccccgggagcagcggcggcggggggcagccgctcgcccggacccctcagccatccagtccaatggatcagatgggcaagatgagacctcagccatatggcgggactaacccatactcgcagcaacagggacctccgtcaggaccgcagcaaggacatgggtacccagggcagccatacgggtcccagaccccgcagcggtacccgatgaccatgcagggccgggcgcagagtgccatgggcggcctctcttatacacagcagattcctccttatggacaacaaggccccagcgggtatggtcaacagggccagactccatattacaaccagcaaagtcctcaccctcagcagcagcagccaccctactcccagcaaccaccgtcccagacccctcatgcccaaccttcgtatcagcagcagccacagtctcaaccaccacagctccagtcctctcagcctccatactcccagcagccatcccagcctccacatcagcagtccccggctccatacccctcccagcagtcgacgacacagcagcacccccagagccagccccccctactcacagccacaggctcagtctccttaccagcagcagcaacctcagcagccagcaccctcgacgctctcccagcaggctgcgtatcctcagccccagtctcagcagtcccagcaaactgcctattcccagcagcgcttccctccaccgcaggagctatctcaagattcatttgggtctcaggcatcctcagccccctcaatgacctccagtaagggagggcaagaagatatgaacctgagccttcagtcaagaccctccagcttgcctgatctatctggttcaatagatgacctccccatggggacagaaggagctctgagtcctggagtgagcacatcagggatttccagcagccaaggagagcagagtaatccagctcagtctcctttctctcctcatacctcccctcacctgcctggcatccgaggcccttccccgtcccctgttggctctcccgccagtgttgctcagtctcgctcaggaccactctcgcctgctgcagtgccaggcaaccagatgccacctcggccacccagtggccagtcggacagcatcatgcatccttccatgaaccaatcaagcattgcccaagatcgaggttatatgcagaggaacccccagatgccccagtacagttccccccagcccggctcagccttatctccgcgtcagccttccggaggacagatacacacaggcatgggctcctaccagcagaactccatggggagctatggtccccaggggggtcagtatggcccacaaggtggctaccccaggcagccaaactataatgccttgcccaatgccaactaccccagtgcaggcatggctggaggcataaaccccatgggtgccggaggtcaaatgcatggacagcctggcatcccaccttatggcacactccctccagggaggatgagtcacgcctccatgggcaaccggccttatggccctaacatggccaatatgccacctcaggttgggtcagggatgtgtcccccaccagggggcatgaaccggaaaacccaagaaactgctgtcgccatgcatgttgctgccaactctatccaaaacaggccgccaggctaccccaatatgaatcaagggggcatgatgggaactggacctccttatggacaagggattaatagtatggctggcatgatcaaccctcagggacccccatattccatgggtggaaccatggccaacaattctgcagggatggcagccagcccagagatgatgggccttggggatgtaaagttaactccagccaccaaaatgaacaacaaggcagatgggacacccaagacagaatccaaatccaagaaatccagttcttctactacaaccaatgagaagatcaccaagttgtatgagctgggtggtgagcctgagaggaagatgtgggtggaccgttatctggccttcactgaggagaaggccatgggcatgacaaatctgcctgctgtgggtaggaaacctctggacctctatcgcctctatgtgtctgtgaaggagattggtggattgactcaggtcaacaagaacaaaaaatggcgggaacttgcaaccaacctcaatgtgggcacatcaagcagtgctgccagctccttgaaaaagcagtatatccagtgtctctatgcctttgaatgcaagattgaacggggagaagaccctcccccagacatctttgcagctgctgattccaagaagtcccagcccaagatccagcctccctctcctgcgggatcaggatctatgcaggggccccagactccccagtcaaccagcagttccatggcagaaggaggagacttaaagccaccaactccagcatccacaccacacagtcagatccccccattgccaggcatgagcaggagcaattcagttgggatccaggatgcctttaatgatggaagtgactccacattccagaagcggaattccatgactccaaaccctgggtatcagcccagtatgaatacctctgacatgatggggcgcatgtcctatgagccaaataaggatccttatggcagcatgaggaaagctccagggagtgatcccttcatgtcctcagggcagggccccaacggcgggatgggtgacccctacagtcgtgctgccggccctgggctaggaaatgtggcgatgggaccacgacagcactatccctatggaggtccttatgacagagtgaggacggagcctggaatagggcctgagggaaacatgagcactggggccccacagccgaatctcatgccttccaacccagactcggggatgtattctcctagccgctaccccccgcagcagcagcagcagcagcagcaacgacatgattcctatggcaatcagttctccacccaaggcaccccttctggcagccccttccccagccagcagactacaatgtatcaacagcaacagcagaattacaagcggccaatggatggcacatatggccctcctgccaagcggcacgaaggggagatgtacagcgtgccatacagcactgggcaggggcagcctcagcagcagcagttgcccccagcccagccccagcctgccagccagcaacaagctgcccagccttcccctcagcaagatgtatacaaccagtatggcaatgcctatcctgccactgccacagctgctactgagcgccgaccagcaggcggcccccagaaccaatttccattccagtttggccgagaccgtgtctctgcaccccctggcaccaatgcccagcaaaacatgccaccacaaatgatgggcggccccatacaggcatcagctgaggttgctcagcaaggcaccatgtggcaggggcgtaatgacatgacctataattatgccaacaggcagagcacgggctctgccccccagggccccgcctatcatggcgtgaaccgaacagatgaaatgctgcacacagatcagagggccaaccacgaaggctcgtggccttcccatggcacacgccagcccccatatggtccctctgcccctgtgccccccatgacaaggccccctccatctaactaccagcccccaccaagcatgcagaatcacattcctcaggtatccagccctgctcccctgccccggccaatggagaaccgcacctctcctagcaagtctccattcctgcactctgggatgaaaatgcagaaggcaggtcccccagtacctgcctcgcacatagcacctgcccctgtgcagccccccatgattcggcgggatatcaccttcccacctggctctgttgaagccacacagcctgtgttgaagcagaggaggcggctcacaatgaaagacattggaaccccggaggcatggcgggtaatgatgtccctcaagtctggtctcctggcagagagcacatgggcattagataccatcaacatcctgctgtatgatgacaacagcatcatgaccttcaacctcagtcagctcccagggttgctagagctccttgtagaatatttccgacgatgcctgattgagatctttggcattttaaaggagtatgaggtgggtgacccaggacagagaacgctactggatcctgggaggttcagcaaggtgtctagtccagctcccatggagggtggggaagaagaagaagaacttctaggtcctaaactagaagaggaagaagaagaggaagtagttgaaaatgatgaggagatagccttttcaggcaaggacaagccagcttcagagaatagtgaggagaagctgatcagtaagtttgacaagcttccagtaaagatcgtacagaagaatgatccatttgtggtggactgctcagataagcttgggcgtgtgcaggagtttgacagtggcctgctgcactggcggattggtgggggggacaccactgagcatatccagacccacttcgagagcaagacagagctgctgccttcccggcctcacgcaccctgcccaccagcccctcggaagcatgtgacaacagcagagggtacaccagggacaacagaccaggaggggcccccacctgatggacctccagaaaaacggatcacagccactatggatgacatgttgtctactcggtctagcaccttgaccgaggatggagctaagagttcagaggccatcaaggagagcagcaagtttccatttggcattagcccagcacagagccaccggaacatcaagatcctagaggacgaaccccacagtaaggatgagaccccactgtgtacccttctggactggcaggattctcttgccaagcgctgcgtctgtgtgtccaataccattcgaagcctgtcatttgtgccaggcaatgactttgagatgtccaaacacccagggctgctgctcatcctgggcaagctgatcctgctgcaccacaagcacccagaacggaagcaggcaccactaacttatgaaaaggaggaggaacaggaccaaggggtgagctgcaacaaagtggagtggtggtgggactgcttggagatgctccgggaaaacaccttggttacactcgccaacatctcggggcagttggacctatctccataccccgagagcatttgcctgcctgtcctggacggactcctacactgggcagtttgcccttcagctgaagcccaggaccccttttccaccctgggccccaatgccgtcctttccccgcagagactggtcttggaaaccctcagcaaactcagcatccaggacaacaatgtggacctgattctggccacaccccccttcagccgcctggagaagttgtatagcactatggtgcgcttcctcagtgaccgaaagaacccggtgtgccgggagatggctgtggtactgctggccaacctggctcagggggacagcctggcagctcgtgccattgcagtgcagaagggcagtatcggcaacctcctgggcttcctagaggacagccttgccgccacacagttccagcagagccaggccagcctcctccacatgcagaacccaccctttgagccaactagtgtggacatgatgcggcgggctgcccgcgcgctgcttgccttggccaaggtggacgagaaccactcagagtttactctgtacgaatcacggctgttggacatctcggtatcaccgttgatgaactcattggtttcacaagtcatttgtgatgtactgtttttgattggccagtcatgacagccgtgggacacctcccccccccgtgtgtgtgtgcgtgtgtggagaacttagaaactgactgttgccctttatttatgcaaaaccacctcagaatccagtttaccctgtgctgtccagcttctcccttgggaaaaagtctctcctgtttctctctcctccttccacctcccctccctccatcacctcacgcctttctgttccttgtcctcaccttactcccctcaggaccctaccccaccctctttgaaaagacaaagctctgcctacatagaagactttttttattttaaccaaagttactgttgtttacagtgagtttggggaaaaaaaataaaataaaaatggctttcccagtccttgcatcaacgggatgccacatttcataactgtttttaatggtaaaaaaaaaaaaaaaaaatacaaaaaaaaattctgaaggacaaaaaaggtgactgctgaactgtgtgtggtttattgttgtacattcacaatcttgcaggagccaagaagttcgcagttgtgaacagaccctgttcactggagaggcctgtgcagtagagtgtagaccctttcatgtactgtactgtacacctgatactgtaaacatactgtaataataatgtctcacatggaaacagaaaacgctgggtcagcagcaagctgtagtttttaaaaatgtttttagttaaacgttgaggagaaaaaaaaaaaaggcttttcccccaaagtatcatgtgtgaacctacaacaccctgacctctttctctcctccttgattgtatgaataaccctgagatcacctcttagaactggttttaacctttagctgcagcggctacgctgccacgtgtgtatatatatgacgttgtacattgcacatacccttggatccccacagtttggtcctcctcccagctacccctttatagtatgacgagttaacaagttggtgacctgcacaaagcgagacacagctatttaatctcttgccagatatcgcccctcttggtgcgatgctgtacaggtctctgtaaaaagtccttgctgtctcagcagccaatcaacttatagtttatttttttctgggtttttgttttgttttgttttctttctaatcgaggtgtgaaaaagttctaggttcagttgaagttctgatgaagaaacacaattgagattttttcagtgataaaatctgcatatttgtatttcaacaatgtagctaaaacttgatgtaaattcctcctttttttccttttttggcttaatgaatatcatttattcagtatgaaatctttatactatatgttccacgtgttaagaataaatgtacattaaatcttggtaagacttt

SEQ ID NO: 4 - DNA, 8584 bp, Homo sapiens
cagaaagcggagagtcacagcggggccaggccctggggagcggagcctccaccgcccccctcattcccaggcaagggcttggggggaatgagccgggagagccgggtcccgagcctacagagccgggagcagctgagccgccggcgcctcggccgccgccgccgcctcctcctcctccgccgccgccagcccggagcctgagccggcggggcgggggggagaggagcgagcgcagcgcagcagcggagccccgcgaggcccgcccgggcgggtggggagggcagcccgggggactgggccccggggcggggtgggagggggggagaagacgaagacagggccgggtctctccgcggacgagacagcggggatcatggccgcgcaggtcgcccccgccgccgccagcagcctgggcaacccgccgccgccgccgccctcggagctgaagaaagccgagcagcagcagcgggaggaggcggggggcgaggcggcggcggcggcagcggccgagcgcggggaaatgaaggcagccgccgggcaggaaagcgagggccccgccgtggggccgccgcagccgctgggaaaggagctgcaggacggggccgagagcaatgggggtggcggcggcggcggagccggcagcggcggcgggcccggcgcggagccggacctgaagaactcgaacgggaacgcgggccctaggcccgccctgaacaataacctcacggagccgcccggcggcggcggtggcggcagcagcgatggggtgggggcgcctcctcactcagccgcggccgccttgccgcccccagcctacggcttcgggcaaccctacggccggagcccgtctgccgtcgccgccgccgcggccgccgtcttccaccaacaacatggcggacaacaaagccctggcctggcagcgctgcagagcggcggcggcgggggcctggagccctacgcggggccccagcagaactctcacgaccacggcttccccaaccaccagtacaactcctactaccccaaccgcagcgcctaccccccgcccgccccggcctacgcgctgagctccccgagaggtggcactccgggctccggcgcggcggcggctgccggctccaagccgcctccctcctccagcgcctccgcctcctcgtcgtcttcgtccttcgctcagcagcgcttcggggccatggggggaggcggcccctccgcggccggcgggggaactccccagcccaccgccacccccaccctcaaccaactgctcacgtcgcccagctcggcccggggctaccagggctaccccgggggcgactacagtggcgggccccaggacgggggcgccggcaagggcccggcggacatggcctcgcagtgttggggggctgcggcggcggcagctgcggcggcggccgcctcgggaggggcccaacaaaggagccaccacgcgcccatgagccccgggagcagcggcggcggggggcagccgctcgcccggacccctcagccatccagtccaatggatcagatgggcaagatgagacctcagccatatggcgggactaacccatactcgcagcaacagggacctccgtcaggaccgcagcaaggacatgggtacccagggcagccatacgggtcccagaccccgcagcggtacccgatgaccatgcagggccgggcgcagagtgccatgggcggcctctcttatacacagcagattcctccttatggacaacaaggccccagcgggtatggtcaacagggccagactccatattacaaccagcaaagtcctcaccctcagcagcagcagccaccctactcccagcaaccaccgtcccagacccctcatgcccaaccttcgtatcagcagcagccacagtctcaaccaccacagctccagtcctctcagcctccatactcccagcagccatcccagcctccacatcagcagtccccggctccatacccctcccagcagtcgacgacacagcagcacccccagagccagcccccctactcacagccacaggctcagtctccttaccagcagcagcaacctcagcagccagcaccctcgacgctctcccagcaggctgcgtatcctcagccccagtctcagcagtcccagcaaactgcctattcccagcagcgcttccctccaccgcaggagctatctcaagattcatttgggtctcaggcatcctcagccccctcaatgacctccagtaagggagggcaagaagatatgaacctgagccttcagtcaagaccctccagcttgcctgatctatctggttcaatagatgacctccccatggggacagaaggagctctgagtcctggagtgagcacatcagggatttccagcagccaaggagagcagagtaatccagctcagtctcctttctctcctcatacctcccctcacctgcctggcatccgaggcccttccccgtcccctgttggctctcccgccagtgttgctcagtctcgctcaggaccactctcgcctgctgcagtgccaggcaaccagatgccacctcggccacccagtggccagtcggacagcatcatgcatccttccatgaaccaatcaagcattgcccaagatcgaggttatatgcagaggaaccccagatgccccagtacagttccccccagcccggctcagccttatctccgcgtcagccttccggaggacagatacacacaggcatgggctcctaccagcagaactccatggggagctatggtccccaggggggtcagtatggcccacaaggtggctaccccaggcagccaaactataatgccttgcccaatgccaactaccccagtgcaggcatggctggaggcataaaccccatgggtgccggaggtcaaatgcatggacagcctggcatcccaccttatggcacactccctccagggaggatgagtcacgcctccatgggcaaccggccttatggccctaacatggccaatatgccacctcaggttgggtcagggatgtgtcccccaccagggggcatgaaccggaaaacccaagaaactgctgtcgccatgcatgttgctgccaactctatccaaaacaggccgccaggctaccccaatatgaatcaagggggcatgatgggaactggacctccttatggacaagggattaatagtatggctggcatgatcaaccctcagggacccccatattccatgggtggaaccatggccaacaattctgcagggatggcagccagcccagagatgatgggccttggggatgtaaagttaactccagccaccaaaatgaacaacaaggcagatgggacacccaagacagaatccaaatccaagaaatccagttcttctactacaaccaatgagaagatcaccaagttgtatgagctgggtggtgagcctgagaggaagatgtgggtggaccgttatctggccttcactgaggagaaggccatgggcatgacaaatctgcctgctgtgggtaggaaacctctggacctctatcgcctctatgtgtctgtgaaggagattggtggattgactcaggtcaacaagaacaaaaaatggcgggaacttgcaaccaacctcaatgtgggcacatcaagcagtgctgccagctccttgaaaaagcagtatatccagtgtctctatgcctttgaatgcaagattgaacggggagaagaccctcccccagacatctttgcagctgctgattccaagaagtcccagcccaagatccagcctccctctcctgcgggatcaggatctatgcaggggccccagactccccagtcaaccagcagttccatggcagaaggaggagacttaaagccaccaactccagcatccacaccacacagtcagatccccccattgccaggcatgagcaggagcaattcagttgggatccaggatgcctttaatgatggaagtgactccacattccagaagcggaattccatgactccaaaccctgggtatcagcccagtatgaatacctctgacatgatggggcgcatgtcctatgagccaaataaggatccttatggcagcatgaggaaagctccagggagtgatcccttcatgtcctcagggcagggccccaacggcgggatgggtgacccctacagtcgtgctgccggccctgggctaggaaatgtggcgatgggaccacgacagcactatccctatggaggtccttatgacagagtgaggacggagcctggaatagggcctgagggaaacatgagcactggggccccacagccgaatctcatgccttccaacccagactcggggatgtattctcctagccgctaccccccgcagcagcagcagcagcagcagcaacgacatgattcctatggcaatcagttctccacccaaggcaccccttctggcagccccttccccagccagcagactacaatgtatcaacagcaacagcagaattacaagcggccaatggatggcacatatggccctcctgccaagcggcacgaaggggagatgtacagcgtgccatacagcactgggcaggggcagcctcagcagcagcagttgcccccagcccagccccagcctgccagccagcaacaagctgcccagccttcccctcagcaagatgtatacaaccagtatggcaatgcctatcctgccactgccacagctgctactgagcgccgaccagcaggcggcccccagaaccaatttccattccagtttggccgagaccgtgtctctgcaccccctggcaccaatgcccagcaaaacatgccaccacaaatgatgggcggccccatacaggcatcagctgaggttgctcagcaaggcaccatgtggcaggggcgtaatgacatgacctataattatgccaacaggcagagcacgggctctgccccccagggccccgcctatcatggcgtgaaccgaacagatgaaatgctgcacacagatcagagggccaaccacgaaggctcgtggccttcccatggcacacgccagcccccatatggtccctctgcccctgtgccccccatgacaaggccccctccatctaactaccagcccccaccaagcatgcagaatcacattcctcaggtatccagccctgctcccctgccccggccaatggagaaccgcacctctcctagcaagtctccattcctgcactctgggatgaaaatgcagaaggcaggtcccccagtacctgcctcgcacatagcacctgcccctgtgcagccccccatgattcggcgggatatcaccttcccacctggctctgttgaagccacacagcctgtgttgaagcagaggaggcggctcacaatgaaagacattggaaccccggaggcatggcgggtaatgatgtccctcaagtctggtctcctggcagagagcacatgggcattagataccatcaacatcctgctgtatgatgacaacagcatcatgaccttcaacctcagtcagctcccagggttgctagagctccttgtagaatatttccgacgatgcctgattgagatctttggcattttaaaggagtatgaggtgggtgacccaggacagagaacgctactggatcctgggaggttcagcaaggtgtctagtccagctcccatggagggtggggaagaagaagaagaacttctaggtcctaaactagaagaggaagaagaagaggaagtagttgaaaatgatgaggagatagccttttcaggcaaggacaagccagcttcagagaatagtgaggagaagctgatcagtaagtttgacaagcttccagtaaagatcgtacagaagaatgatccatttgtggtggactgctcagataagcttgggcgtgtgcaggagtttgacagtggcctgctgcactggcggattggtgggggggacaccactgagcatatccagacccacttcgagagcaagacagagctgctgccttcccggcctcacgcaccctgcccaccagcccctcggaagcatgtgacaacagcagagggtacaccagggacaacagaccaggaggggcccccacctgatggacctccagaaaaacggatcacagccactatggatgacatgttgtctactcggtctagcaccttgaccgaggatggagctaagagttcagaggccatcaaggagagcagcaagtttccatttggcattagcccagcacagagccaccggaacatcaagatcctagaggacgaaccccacagtaaggatgagaccccactgtgtacccttctggactggcaggattctcttgccaagcgctgcgtctgtgtgtccaataccattcgaagcctgtcatttgtgccaggcaatgactttgagatgtccaaacacccagggctgctgctcatcctgggcaagctgatcctgctgcaccacaagcacccagaacggaagcaggcaccactaacttatgaaaaggaggaggaacaggaccaaggggtgagctgcaacaaagtggagtggtggtgggactgcttggagatgctccgggaaaacaccttggttacactcgccaacatctcggggcagttggacctatctccataccccgagagcatttgcctgcctgtcctggacggactcctacactgggcagtttgcccttcagctgaagcccaggaccccttttccaccctgggccccaatgccgtcctttccccgcagagactggtcttggaaaccctcagcaaactcagcatccaggacaacaatgtggacctgattctggccacaccccccttcagccgcctggagaagttgtatagcactatggtgcgcttcctcagtgaccgaaagaacccggtgtgccgggagatggctgtggtactgctggccaacctggctcagggggacagcctggcagctcgtgccattgcagtgcagaagggcagtatcggcaacctcctgggcttcctagaggacagccttgccgccacacagttccagcagagccaggccagcctcctccacatgcagaacccaccctttgagccaactagtgtggacatgatgcggcgggctgcccgcgcgctgcttgccttggccaaggtggacgagaaccactcagagtttactctgtacgaatcacggctgttggacatctcggtatcaccgttgatgaactcattggtttcacaagtcatttgtgatgtactgtttttgattggccagtcatgacagccgtgggacacctcccccccccgtgtgtgtgtgcgtgtgtggagaacttagaaactgactgttgccctttatttatgcaaaaccacctcagaatccagtttaccctgtgctgtccagcttctcccttgggaaaaagtctctcctgtttctctctcctccttccacctcccctccctccatcacctcacgcctttctgttccttgtcctcaccttactcccctcaggaccctaccccaccctctttgaaaagacaaagctctgcctacatagaagactttttttattttaaccaaagttactgttgtttacagtgagtttggggaaaaaaaataaaataaaaatggctttcccagtccttgcatcaacgggatgccacatttcataactgtttttaatggtaaaaaaaaaaaaaaaaaatacaaaaaaaaattctgaaggacaaaaaaggtgactgctgaactgtgtgtggtttattgttgtacattcacaatcttgcaggagccaagaagttcgcagttgtgaacagaccctgttcactggagaggcctgtgcagtagagtgtagaccctttcatgtactgtactgtacacctgatactgtaaacatactgtaataataatgtctcacatggaaacagaaaacgctgggtcagcagcaagctgtagtttttaaaaatgtttttagttaaacgttgaggagaaaaaaaaaaaaggcttttcccccaaagtatcatgtgtgaacctacaacaccctgacctctttctctcctccttgattgtatgaataaccctgagatcacctcttagaactggttttaacctttagctgcagcggctacgctgccacgtgtgtatatatatgacgttgtacattgcacatacccttggatccccacagtttggtcctcctcccagctacccctttatagtatgacgagttaacaagttggtgacctgcacaaagcgagacacagctatttaatctcttgccagatatcgcccctcttggtgcgatgctgtacaggtctctgtaaaaagtccttgctgtctcagcagccaatcaacttatagtttatttttttctgggtttttgttttgttttgttttctttctaatcgaggtgtgaaaaagttctaggttcagttgaagttctgatgaagaaacacaattgagattttttcagtgataaaatctgcatatttgtatttcaacaatgtagctaaaacttgatgtaaattcctcctttttttccttttttggcttaatgaatatcatttattcagtatgaaatctttatactatatgttccacgtgttaagaataaatgtacattaaatcttggtaagacttt

SEQ ID NO: 5 - DNA, 8582 bp, Homo sapiens
cagaaagcggagagtcacagcggggccaggccctggggagcggagcctccaccgcccccctcattcccaggcaagggcttggggggaatgagccgggagagccgggtcccgagcctacagagccgggagcagctgagccgccggcgcctcggccgccgccgccgcctcctcctcctccgccgccgccagcccggagcctgagccggcggggcgggggggagaggagcgagcgcagcgcagcagcggagccccgcgaggcccgcccgggcgggtggggagggcagcccgggggactgggccccggggcggggtgggagggggggagaagacgaagacagggccgggtctctccgcggacgagacagcggggatcatggccgcgcaggtcgcccccgccgccgccagcagcctgggcaacccgccgccgccgccgccctcggagctgaagaaagccgagcagcagcagcgggaggaggcggggggcgaggcggcggcggcggcagcggccgagcgcggggaaatgaaggcagccgccgggcaggaaagcgagggccccgccgtggggccgccgcagccgctgggaaaggagctgcaggacggggccgagagcaatgggggtggcggcggcggcggagccggcagcggcggcgggcccggcgcggagccggacctgaagaactcgaacgggaacgcgggccctaggcccgccctgaacaataacctcacggagccgcccggcggcggcggtggcggcagcagcgatggggtgggggcgcctcctcactcagccgcggccgccttgccgcccccagcctacggcttcgggcaaccctacggccggagcccgtctgccgtcgccgccgccgcggccgccgtcttccaccaacaacatggcggacaacaaagccctggcctggcagcgctgcagagcggcggcggcgggggcctggagccctacgcggggccccagcagaactctcacgaccacggcttccccaaccaccagtacaactcctactaccccaaccgcagcgcctaccccccgcccgccccggcctacgcgctgagctccccgagaggtggcactccgggctccggcgcggcggcggctgccggctccaagccgcctccctcctccagcgcctccgcctcctcgtcgtcttcgtccttcgctcagcagcgcttcggggccatggggggaggcggcccctccgcggccggcgggggaactccccagcccaccgccacccccaccctcaaccaactgctcacgtcgcccagctcggcccggggctaccagggctaccccgggggcgactacagtggcgggccccaggacgggggcgccggcaagggcccggcggacatggcctcgcagtgttggggggctgcggcggcggcagctgcggcggcggccgcctcgggaggggcccaacaaaggagccaccacgcgcccatgagccccgggagcagcggcggcggggggcagccgctcgcccggacccctcagccatccagtccaatggatcagatgggcaagatgagacctcagccatatggcgggactaacccatactcgcagcaacagggacctccgtcaggaccgcagcaaggacatgggtacccagggcagccatacgggtcccagaccccgcagcggtacccgatgaccatgcagggccgggcgcagagtgccatgggcggcctctcttatacacagcagattcctccttatggacaacaaggccccagcgggtatggtcaacagggccagactccatattacaaccagcaaagtcctcaccctcagcagcagcagccaccctactcccagcaaccaccgtcccagacccctcatgcccaaccttcgtatcagcagcagccacagtctcaaccaccacagctccagtcctctcagcctccatactcccagcagccatcccagcctccacatcagcagtccccggctccatacccctcccagcagtcgacgacacagcagcacccccagagccagcccccctactcacagccacaggctcagtctccttaccagcagcagcaacctcagcagccagcaccctcgacgctctcccagcaggctgcgtatcctcagccccagtctcagcagtcccagcaaactgcctattcccagcagcgcttccctccaccgcaggagctatctcaagattcatttgggtctcaggcatcctcagccccctcaatgacctccagtaagggagggcaagaagatatgaacctgagccttcagtcaagaccctccagcttgcctgatctatctggttcaatagatgacctccccatggggacagaaggagctctgagtcctggagtgagcacatcagggatttccagcagccaaggagagcagagtaatccagctcagtctcctttctctcctcatacctcccctcacctgcctggcatccgaggcccttccccgtcccctgttggctctcccgccagtgttgctcagtctcgctcaggaccactctcgcctgctgcagtgccaggcaaccagatgccacctcggccacccagtggccagtcggacagcatcatgcatccttccatgaaccaatcaagcattgcccaagatcgaggttatatgcagaggaacccccagatgccccagtacagttccccccagcccggctcagccttatctccgcgtcagccttccggaggacagatacacacaggcatgggctcctaccagcagaactccatggggagctatggtccccaggggggtcagtatggcccacaaggtggctaccccaggcagccaaactataatgccttgcccaatgccaactaccccagtgcaggcatggctggaggcataaaccccatgggtgccggaggtcaaatgcatggacagcctggcatcccaccttatggcacactccctccagggaggatgagtcacgcctccatgggcaaccggccttatggccctaacatggccaatatgccacctcaggttgggtcagggatgtgtcccccaccagggggcatgaaccggaaaacccaagaaactgctgtcgccatgcatgttgctgccaactctatccaaaacaggccgccaggctaccccaatatgaatcaagggggcatgatgggaactggacctccttatggacaagggattaatagtatggctggcatgatcaaccctcagggacccccatattccatgggtggaaccatggccaacaattctgcagggatggcagccagcccagagatgatgggccttggggatgtaaagttaactccagccaccaaaatgaacaacaaggcagatgggacacccaagacagaatccaaatccaagaaatccagttcttctactacaaccaatgagaagatcaccaagttgtatgagctgggtggtgagcctgagaggaagatgtgggtggaccgttatctggccttcactgaggagaaggccatgggcatgacaaatctgcctgctgtgggtaggaaacctctggacctctatcgcctctatgtgtctgtgaaggagattggtggattgactcaggtcaacaagaacaaaaaatggcgggaacttgcaaccaacctcaatgtgggcacatcaagcagtgctgccagctccttgaaaaagcagtatatccagtgtctctatgcctttgaatgcaagattgaacggggagaagaccctcccccagacatctttgcagctgctgattccaagaagtcccagcccaagatccagcctccctctcctgcgggatcaggatctatgcaggggccccagactccccagtcaaccagcagttccatggcagaaggaggagacttaaagccaccaactccagcatccacaccacacagtcagatccccccattgccaggcatgagcaggagcaattcagttgggatccaggatgcctttaatgatggaagtgactccacattccagaagcggaattccatgactccaaaccctgggtatcagcccagtatgaatacctctgacatgatggggcgcatgtcctatgagccaaataaggatccttatggcagcatgaggaaagctccagggagtgatcccttcatgtcctcagggcagggccccaacggcgggatgggtgacccctacagtcgtgctgccggccctgggctaggaaatgtggcgatgggaccacgacagcactatccctatggaggtccttatgacagagtgaggacggagcctggaatagggcctgagggaaacatgagcactggggccccacagccgaatctcatgccttccaacccagactcggggatgtattctcctagccgctaccccccgcagcagcagcagcagcagcagcaacgacatgattcctatggcaatcagttctccacccaaggcaccccttctggcagccccttccccagccagcagactacaatgtatcaacagcaacagcagaattacaagcggccaatggatggcacatatggccctcctgccaagcggcacgaaggggagatgtacagcgtgccatacagcactgggcaggggcagcctcagcagcagcagttgcccccagcccagccccagcctgccagccagcaacaagctgcccagccttcccctcagcaagatgtatacaaccagtatggcaatgcctatcctgccactgccacagctgctactgagcgccgaccagcaggcggcccccagaaccaatttccattccagtttggccgagaccgtgtctctgcaccccctggcaccaatgcccagcaaaacatgccaccacaaatgatgggcggccccatacaggcatcagctgaggttgctcagcaaggcaccatgtggcaggggcgtaatgacatgacctataattatgccaacaggcagagcacgggctctgccccccagggccccgcctatcatggcgtgaaccgaacagatgaaatgctgcacacagatcagagggccaaccacgaaggctcgtggccttcccatggcacacgccagcccccatatggtccctctgcccctgtgccccccatgacaaggccccctccatctaactaccagcccccaccaagcatgcagaatcacattcctcaggtatccagccctgctcccctgccccggccaatggagaaccgcacctctcctagcaagtctccattcctgcactctgggatgaaaatgcagaaggcaggtcccccagtacctgcctcgcacatagcacctgcccctgtgcagccccccatgattcggcgggatatcaccttcccacctggctctgttgaagccacacagcctgtgttgaagcagaggaggcggctcacaatgaaagacattggaaccccggaggcatggcgggtaatgatgtccctcaagtctggtctcctggcagagagcacatgggcattagataccatcaacatcctgctgtatgatgacaacagcatcatgaccttcaacctcagtcagctcccagggttgctagagctccttgtagaatatttccgacgatgcctgattgagatctttggcattttaaaggagtatgaggtgggtgacccaggacagagaacgctactggatcctgggaggttcagcaaggtgtctagtccagctcccatggagggtggggaagaagaagaagaacttctaggtcctaaactagaagaggaagaagaagaggaagtagttgaaaatgatgaggagatagccttttcaggcaaggacaagccagcttcagagaatagtgaggagaagctgatcagtaagtttgacaagcttccagtaaagatcgtacagaagaatgatccatttgtggtggactgctcagataagcttgggcgtgtgcaggagtttgacagtggcctgctgcactggcggattggtgggggggacaccactgagcatatccagacccacttcgagagcaagacagagctgctgccttcccggcctcacgcaccctgcccaccagcccctcggaagcatgtgacaacagcagagggtacaccagggacaacagaccaggaggggcccccacctgatggacctccagaaaaacggatcacagccactatggatgacatgttgtctactcggtctagcaccttgaccgaggatggagctaagagttcagaggccatcaaggagagcagcaagtttccatttggcattagcccagcacagagccaccggaacatcaagatcctagaggacgaaccccacagtaaggatgagaccccactgtgtacccttctggactggcaggattctcttgccaagcgctgcgtctgtgtgtccaataccattcgaagcctgtcatttgtgccaggcaatgactttgagatgtccaaacacccagggctgctcatcctgggcaagctgatcctgctgcaccacaagcacccagaacggaagcaggcaccactaacttatgaaaaggaggaggaacaggaccaaggggtgagctgcaacaaagtggagtggtggtgggactgcttggagatgctccgggaaaacaccttggttacactcgccaacatctcggggcagttggacctatctccataccccgagagcatttgcctgcctgtcctggacggactcctacactgggcagtttgcccttcagctgaagcccaggaccccttttccaccctgggccccaatgccgtcctttccccgcagagactggtcttggaaaccctcagcaaactcagcatccaggacaacaatgtggacctgattctggccacaccccccttcagccgcctggagaagttgtatagcactatggtgcgcttcctcagtgaccgaaagaacccggtgtgccgggagatggctgtggtactgctggccaacctggctcagggggacagcctggcagctcgtgccattgcagtgcagaagggcagtatcggcaacctcctgggcttcctagaggacagccttgccgccacacagttccagcagagccaggccagcctcctccacatgcagaacccaccctttgagccaactagtgtggacatgatgcggcgggctgcccgcgcgctgcttgccttggccaaggtggacgagaaccactcagagtttactctgtacgaatcacggctgttggacatctcggtatcaccgttgatgaactcattggtttcacaagtcatttgtgatgtactgtttttgattggccagtcatgacagccgtgggacacctcccccccccgtgtgtgtgtgcgtgtgtggagaacttagaaactgactgttgccctttatttatgcaaaaccacctcagaatccagtttaccctgtgctgtccagcttctcccttgggaaaaagtctctcctgtttctctctcctccttccacctcccctccctccatcacctcacgcctttctgttccttgtcctcaccttactcccctcaggaccctaccccaccctctttgaaaagacaaagctctgcctacatagaagactttttttattttaaccaaagttactgttgtttacagtgagtttggggaaaaaaaataaaataaaaatggctttcccagtccttgcatcaacgggatgccacatttcataactgtttttaatggtaaaaaaaaaaaaaaaaaatacaaaaaaaaattctgaaggacaaaaaaggtgactgctgaactgtgtgtggtttattgttgtacattcacaatcttgcaggagccaagaagttcgcagttgtgaacagaccctgttcactggagaggcctgtgcagtagagtgtagaccctttcatgtactgtactgtacacctgatactgtaaacatactgtaataataatgtctcacatggaaacagaaaacgctgggtcagcagcaagctgtagtttttaaaaatgtttttagttaaacgttgaggagaaaaaaaaaaaaggcttttcccccaaagtatcatgtgtgaacctacaacaccctgacctctttctctcctccttgattgtatgaataaccctgagatcacctcttagaactggttttaacctttagctgcagcggctacgctgccacgtgtgtatatatatgacgttgtacattgcacatacccttggatccccacagtttggtcctcctcccagctacccctttatagtatgacgagttaacaagttggtgacctgcacaaagcgagacacagctatttaatctcttgccagatatcgcccctcttggtgcgatgctgtacaggtctctgtaaaaagtccttgctgtctcagcagccaatcaacttatagtttatttttttctgggtttttgttttgttttgttttctttctaatcgaggtgtgaaaaagttctaggttcagttgaagttctgatgaagaaacacaattgagattttttcagtgataaaatctgcatatttgtatttcaacaatgtagctaaaacttgatgtaaattcctcctttttttccttttttggcttaatgaatatcatttattcagtatgaaatctttatactatatgttccacgtgttaagaataaatgtacattaaatcttggtaagacttt

SEQ ID NO: 6 - DNA, 8584 bp, Homo sapiens
cagaaagcggagagtcacagcggggccaggccctggggagcggagcctccaccgcccccctcattcccaggcaagggcttggggggaatgagccgggagagccgggtcccgagcctacagagccgggagcagctgagccgccggcgcctcggccgccgccgccgcctcctcctcctccgccgccgccagcccggagcctgagccggcggggcgggggggagaggagcgagcgcagcgcagcagcggagccccgcgaggcccgcccgggcgggtggggagggcagcccgggggactgggccccggggcggggtgggagggggggagaagacgaagacagggccgggtctctccgcggacgagacagcggggatcatggccgcgcaggtcgcccccgccgccgccagcagcctgggcaacccgccgccgccgccgccctcggagctgaagaaagccgagcagcagcagcgggaggaggcggggggcgaggcggcggcggcggcagcggccgagcgcggggaaatgaaggcagccgccgggcaggaaagcgagggccccgccgtggggccgccgcagccgctgggaaaggagctgcaggacggggccgagagcaatgggggtggcggcggcggcggagccggcagcggcggcgggcccggcgcggagccggacctgaagaactcgaacgggaacgcgggccctaggcccgccctgaacaataacctcacggagccgcccggcggcggcggtggcggcagcagcgatggggtgggggcgctcctcactcagccgcggccgccttgccgcccccagcctacggcttcgggcaaccctacggccggagcccgtctgccgtcgccgccgccgcggccgccgtcttccaccaacaacatggcggacaacaaagccctggcctggcagcgctgcagagcggcggcggcgggggcctggagccctacgcggggccccagcagaactctcacgaccacggcttccccaaccaccagtacaactcctactaccccaaccgcagcgcctaccccccgcccgccccggcctacgcgctgagctccccgagaggtggcactccgggctccggcgcggcggcggctgccggctccaagccgcctccctcctccagcgcctccgcctcctcgtcgtcttcgtccttcgctcagcagcgcttcggggccatggggggaggcggcccctccgcggccggcgggggaactccccagcccaccgccacccccaccctcaaccaactgctcacgtcgcccagctcggcccggggctaccagggctaccccgggggcgactacagtggcgggccccaggacgggggcgccggcaagggcccggcggacatggcctcgcagtgttggggggctgcggcggcggcagctgcggcggcggccgcctcgggaggggcccaacaaaggagccaccacgcgcccatgagccccgggagcagcggcggcggggggcagccgctcgcccggacccctcagccatccagtccaatggatcagatgggcaagatgagacctcagccatatggcgggactaacccatactcgcagcaacagggacctccgtcaggaccgcagcaaggacatgggtacccagggcagccatacgggtcccagaccccgcagcggtacccgatgaccatgcagggccgggcgcagagtgccatgggcggcctctcttatacacagcagattcctccttatggacaacaaggccccagcgggtatggtcaacagggccagactccatattacaaccagcaaagtcctcaccctcagcagcagcagccaccctactcccagcaaccaccgtcccagacccctcatgcccaaccttcgtatcagcagcagccacagtctcaaccaccacagctccagtcctctcagcctccatactcccagcagccatcccagcctccacatcagcagtccccggctccatacccctcccagcagtcgacgacacagcagcacccccagagccagcccccctactcacagccacaggctcagtctccttaccagcagcagcaacctcagcagccagcaccctcgacgctctcccagcaggctgcgtatcctcagccccagtctcagcagtcccagcaaactgcctattcccagcagcgcttccctccaccgcaggagctatctcaagattcatttgggtctcaggcatcctcagccccctcaatgacctccagtaagggagggcaagaagatatgaacctgagccttcagtcaagaccctccagcttgcctgatctatctggttcaatagatgacctccccatggggacagaaggagctctgagtcctggagtgagcacatcagggatttccagcagccaaggagagcagagtaatccagctcagtctcctttctctcctcatacctcccctcacctgcctggcatccgaggcccttccccgtcccctgttggctctcccgccagtgttgctcagtctcgctcaggaccactctcgcctgctgcagtgccaggcaaccagatgccacctcggccacccagtggccagtcggacagcatcatgcatccttccatgaaccaatcaagcattgcccaagatcgaggttatatgcagaggaacccccagatgccccagtacagttccccccagcccggctcagccttatctccgcgtcagccttccggaggacagatacacacaggcatgggctcctaccagcagaactccatggggagctatggtccccaggggggtcagtatggcccacaaggtggctaccccaggcagccaaactataatgccttgcccaatgccaactaccccagtgcaggcatggctggaggcataaaccccatgggtgccggaggtcaaatgcatggacagcctggcatcccaccttatggcacactccctccagggaggatgagtcacgcctccatgggcaaccggccttatggccctaacatggccaatatgccacctcaggttgggtcagggatgtgtcccccaccagggggcatgaaccggaaaacccaagaaactgctgtcgccatgcatgttgctgccaactctatccaaaacaggccgccaggctaccccaatatgaatcaagggggcatgatgggaactggacctccttatggacaagggattaatagtatggctggcatgatcaaccctcagggacccccatattccatgggtggaaccatggccaacaattctgcagggatggcagccagcccagagatgatgggccttggggatgtaaagttaactccagccaccaaaatgaacaacaaggcagatgggacacccaagacagaatccaaatccaagaaatccagttcttctactacaaccaatgagaagatcaccaagttgtatgagctgggtggtgagcctgagaggaagatgtgggtggaccgttatctggccttcactgaggagaaggccatgggcatgacaaatctgcctgctgtgggtaggaaacctctggacctctatcgcctctatgtgtctgtgaaggagattggtggattgactcaggtcaacaagaacaaaaaatggcgggaacttgcaaccaacctcaatgtgggcacatcaagcagtgctgccagctccttgaaaaagcagtatatccagtgtctctatgcctttgaatgcaagattgaacggggagaagaccctcccccagacatctttgcagctgctgattccaagaagtcccagcccaagatccagcctccctctcctgcgggatcaggatctatgcaggggccccagactccccagtcaaccagcagttccatggcagaaggaggagacttaaagccaccaactccagcatccacaccacacagtcagatccccccattgccaggcatgagcaggagcaattcagttgggatccaggatgcctttaatgatggaagtgactccacattccagaagcggaattccatgactccaaaccctgggtatcagcccagtatgaatacctctgacatgatggggcgcatgtcctatgagccaaataaggatccttatggcagcatgaggaaagctccagggagtgatcccttcatgtcctcagggcagggccccaacggcgggatgggtgacccctacagtcgtgctgccggccctgggctaggaaatgtggcgatgggaccacgacagcactatccctatggaggtccttatgacagagtgaggacggagcctggaatagggcctgagggaaacatgagcactggggccccacagccgaatctcatgccttccaacccagactcggggatgtattctcctagccgctaccccccgcagcagcagcagcagcagcagcaacgacatgattcctatggcaatcagttctccacccaaggcaccccttctggcagccccttccccagccagcagactacaatgtatcaacagcaacagcagaattacaagcggccaatggatggcacatatggccctcctgccaagcggcacgaaggggagatgtacagcgtgccatacagcactgggcaggggcagcctcagcagcagcagttgcccccagcccagccccagcctgccagccagcaacaagctgcccagccttcccctcagcaagatgtatacaaccagtatggcaatgcctatcctgccactgccacagctgctactgagcgccgaccagcaggcggcccccagaaccaatttccattccagtttggccgagaccgtgtctctgcaccccctggcaccaatgcccagcaaaacatgccaccacaaatgatgggcggccccatacaggcatcagctgaggttgctcagcaaggcaccatgtggcaggggcgtaatgacatgacctataattatgccaacaggcagagcacgggctctgccccccagggccccgcctatcatggcgtgaaccgaacagatgaaatgctgcacacagatcagagggccaaccacgaaggctcgtggccttcccatggcacacgccagcccccatatggtccctctgcccctgtgccccccatgacaaggccccctccatctaactaccagcccccaccaagcatgcagaatcacattcctcaggtatccagccctgctcccctgccccggccaatggagaaccgcacctctcctagcaagtctccattcctgcactctgggatgaaaatgcagaaggcaggtcccccagtacctgcctcgcacatagcacctgcccctgtgcagccccccatgattcggcgggatatcaccttcccacctggctctgttgaagccacacagcctgtgttgaagcagaggaggcggctcacaatgaaagacattggaaccccggaggcatggcgggtaatgatgtccctcaagtctggtctcctggcagagagcacatgggcattagataccatcaacatcctgctgtatgatgacaacagcatcatgaccttcaacctcagtcagctcccagggttgctagagctccttgtagaatatttccgacgatgcctgattgagatctttggcattttaaaggagtatgaggtgggtgacccaggacagagaacgctactggatcctgggaggttcagcaaggtgtctagtccagctcccatggagggtggggaagaagaagaagaacttctaggtcctaaactagaagaggaagaagaagaggaagtagttgaaaatgatgaggagatagccttttcaggcaaggacaagccagcttcagagaatagtgaggagaagctgatcagtaagtttgacaagcttccagtaaagatcgtacagaagaatgatccatttgtggtggactgctcagataagcttgggcgtgtgcaggagtttgacagtggcctgctgcactggcggattggtgggggggacaccactgagcatatccagacccacttcgagagcaagacagagctgctgccttcccggcctcacgcaccctgcccaccagcccctcggaagcatgtgacaacagcagagggtacaccagggacaacagaccaggaggggcccccacctgatggacctccagaaaaacggatcacagccactatggatgacatgttgtctactcggtctagcaccttgaccgaggatggagctaagagttcagaggccatcaaggagagcagcaagtttccatttggcattagcccagcacagagccaccggaacatcaagatcctagaggacgaaccccacagtaaggatgagaccccactgtgtacccttctggactggcaggattctcttgccaagcgctgcgtctgtgtgtccaataccattcgaagcctgtcatttgtgccaggcaatgactttgagatgtccaaacacccagggctgctgctcatcctgggcaagctgatcctgctgcaccacaagcacccagaacggaagcaggcaccactaacttatgaaaaggaggaggaacaggaccaaggggtgagctgcaacaaagtggagtggtggtgggactgcttggagatgctccgggaaaacaccttggttacactcgccaacatctcggggcagttggacctatctccataccccgagagcatttgcctgcctgtcctggacggactcctacactgggcagtttgcccttcagctgaagcccaggaccccttttccaccctgggccccaatgccgtcctttccccgcagagactggtcttggaaaccctcagcaaactcagcatccaggacaacaatgtggacctgattctggccacaccccccttcagccgcctggagaagttgtatagcactatggtgcgcttcctcagtgaccgaaagaacccggtgtgccgggagatggctgtggtactgctggccaacctggctcagggggacagcctggcagctcgtgccattgcagtgcagaagggcagtatcggcaacctcctgggcttcctagaggacagccttgccgccacacagttccagcagagccaggccagcctcctccacatgcagaacccaccctttgagccaactagtgtggacatgatgcggcgggctgcccgcgcgctgcttgccttggccaaggtggacgagaaccactcagagtttactctgtacgaatcacggctgttggacatctcggtatcaccgttgatgaactcattggtttcacaagtcatttgtgatgtactgtttttgattggccagtcatgacagccgtgggacacctcccccccccgtgtgtgtgtgcgtgtgtggagaacttagaaactgactgttgccctttatttatgcaaaaccacctcagaatccagtttaccctgtgctgtccagcttctcccttgggaaaaagtctctcctgtttctctctcctccttccacctcccctccctccatcacctcacgcctttctgttccttgtcctcaccttactcccctcaggaccctaccccaccctctttgaaaagacaaagctctgcctacatagaagactttttttattttaaccaaagttactgttgtttacagtgagtttggggaaaaaaaataaaataaaaatggctttcccagtccttgcatcaacgggatgccacatttcataactgtttttaatggtaaaaaaaaaaaaaaaaaatacaaaaaaaaattctgaaggacaaaaaaggtgactgctgaactgtgtgtggtttattgttgtacattcacaatcttgcaggagccaagaagttcgcagttgtgaacagaccctgttcactggagaggcctgtgcagtagagtgtagaccctttcatgtactgtactgtacacctgatactgtaaacatactgtaataataatgtctcacatggaaacagaaaacgctgggtcagcagcaagctgtagtttttaaaaatgtttttagttaaacgttgaggagaaaaaaaaaaaaggcttttcccccaaagtatcatgtgtgaacctacaacaccctgacctctttctctcctccttgattgtatgaataaccctgagatcacctcttagaactggttttaacctttagctgcagcggctacgctgccacgtgtgtatatatatgacgttgtacattgcacatacccttggatccccacagtttggtcctcctcccagctacccctttatagtatgacgagttaacaagttggtgacctgcacaaagcgagacacagctatttaatctcttgccagatatcgcccctcttggtgcgatgctgtacaggtctctgtaaaaagtccttgctgtctcagcagccaatcaacttatagtttatttttttctgggtttttgttttgttttgttttctttctaatcgaggtgtgaaaaagttctaggttcagttgaagttctgatgaagaaacacaattgagattttttcagtgataaaatctgcatatttgtatttcaacaatgtagctaaaacttgatgtaaattcctcctttttttccttttttggcttaatgaatatcatttattcagtatgaaatctttatactatatgttccacgtgttaagaataaatgtacattaaatcttggtaagacttt

SEQ ID NO: 7 - DNA, 8584 bp, Homo sapiens
cagaaagcggagagtcacagcggggccaggccctggggagcggagcctccaccgcccccctcattcccaggcaagggcttggggggaatgagccgggagagccgggtcccgagcctacagagccgggagcagctgagccgccggcgcctcggccgccgccgccgcctcctcctcctccgccgccgccagcccggagcctgagccggcggggcgggggggagaggagcgagcgcagcgcagcagcggagccccgcgaggcccgcccgggcgggtggggagggcagcccgggggactgggccccggggcggggtgggagggggggagaagacgaagacagggccgggtctctccgcggacgagacagcggggatcatggccgcgcaggtcgcccccgccgccgccagcagcctgggcaacccgccgccgccgccgccctcggagctgaagaaagccgagcagcagcagcgggaggaggcggggggcgaggcggcggcggcggcagcggccgagcgcggggaaatgaaggcagccgccgggcaggaaagcgagggccccgccgtggggccgccgcagccgctgggaaaggagctgcaggacggggccgagagcaatgggggtggcggcggcggcggagccggcagcggcggcgggcccggcgcggagccggacctgaagaactcgaacgggaacgcgggccctaggcccgccctgaacaataacctcacggagccgcccggcggcggcggtggcggcagcagcgatggggtgggggcgcctcctcactcagccgcggccgccttgccgcccccagcctacggcttcgggcaaccctacggccggagcccgtctgccgtcgccgccgccgcggccgccgtcttccaccaacaacatggcggacaacaaagccctggcctggcagcgctgcagagcggcggcggcgggggcctggagccctacgcggggccccagcagaactctcacgaccacggcttccccaaccaccagtacaactcctactaccccaaccgcagcgcctaccccccgcccgccccggcctacgcgctgagctccccgagaggtggcactccgggctccggcgcggcggcggctgccggctccaagccgcctccctcctccagcgcctccgcctcctcgtcgtcttcgtccttcgctcagcagcgcttcggggccatggggggaggcggcccctccgcggccggcgggggaactccccagcccaccgccacccccaccctcaaccaactgctcacgtcgcccagctcggcccggggctaccagggctaccccgggggcgactacagtggcgggccccaggacgggggcgccggcaagggcccggcggacatggcctcgcagtgttggggggctgcggcggcggcagctgcggcggcggccgcctcgggaggggcccaacaaaggagccaccacgcgcccatgagccccgggagcagcggcggcggggggcagccgctcgcccggacccctcagccatccagtccaatggatcagatgggcaagatgagacctcagccatatggcgggactaacccatactcgcagcaacagggacctccgtcaggaccgcagcaaggacatgggtacccagggcagccatacgggtcccagaccccgcagcggtacccgatgaccatgcagggccgggcgcagagtgccatgggcggcctctcttatacacagcagattcctccttatggacaacaaggccccagcgggtatggtcaacagggccagactccatattacaaccagcaaagtcctcaccctcagcagcagcagccaccctactcccagcaaccaccgtcccagacccctcatgcccaaccttcgtatcagcagcagccacagtctcaaccaccacagctccagtcctctcagcctccatactcccagcagccatcccagcctccacatcagcagtccccggctccatacccctcccagcagtcgacgacacagcagcacccccagagccagcccccctactcacagccacaggctcagtctccttaccagcagcagcaacctcagcagccagcaccctcgacgctctcccagcaggctgcgtatcctcagccccagtctcagcagtcccagcaaactgcctattcccagcagcgcttccctccaccgcaggagctatctcaagattcatttgggtctcaggcatcctcagccccctcaatgacctccagtaagggagggcaagaagatatgaacctgagccttcagtcaagaccctccagcttgcctgatctatctggttcaatagatgacctccccatggggacagaaggagctctgagtcctggagtgagcacatcagggatttccagcagccaaggagagcagagtaatccagctcagtctcctttctctcctcatacctcccctcacctgcctggcatccgaggcccttccccgtcccctgttggctctcccgccagtgttgctcagtctcgctcaggaccactctcgcctgctgcagtgccaggcaaccagatgccacctcggccacccagtggccagtcggacagcatcatgcatccttccatgaaccaatcaagcattgcccaagatcgaggttatatgcagaggaacccccagatgccccagtacagttccccccagcccggctcagccttatctccgcgtcagccttccggaggacagatacacacaggcatgggctcctaccagcagaactccatggggagctatggtccccaggggggtcagtatggcccacaaggtggctaccccaggcagccaaactataatgccttgcccaatgccaactaccccagtgcaggcatggctggaggcataaaccccatgggtgccggaggtcaaatgcatggacagcctggcatcccaccttatggcacactccctccagggaggatgagtcacgcctccatgggcaaccggccttatggccctaacatggccaatatgccacctcaggttgggtcagggatgtgtcccccaccagggggcatgaaccggaaaacccaagaaactgctgtcgccatgcatgttgctgccaactctatccaaaacaggccgccaggctaccccaatatgaatcaagggggcatgatgggaactggacctccttatggacaagggattaatagtatggctggcatgatcaaccctcagggacccccatattccatgggtggaaccatggccaacaattctgcagggatggcagccagcccagagatgatgggccttggggatgtaaagttaactccagccaccaaaatgaacaacaaggcagatgggacacccaagacagaatccaaatccaagaaatccagttcttctactacaaccaatgagaagatcaccaagttgtatgagctgggtggtgagcctgagaggaagatgtgggtggaccgttatctggccttcactgaggagaaggccatgggcatgacaaatctgcctgctgtgggtaggaaacctctggacctctatcgcctctatgtgtctgtgaaggagattggtggattgactcaggtcaacaagaacaaaaaatggcgggaacttgcaaccaacctcaatgtgggcacatcaagcagtgctgccagctccttgaaaaagcagtatatccagtgtctctatgcctttgaatgcaagattgaacggggagaagaccctcccccagacatctttgcagctgctgattccaagaagtcccagcccaagatccagcctccctctcctgcgggatcaggatctatgcaggggccccagactccccagtcaaccagcagttccatggcagaaggaggagacttaaagccaccaactccagcatccacaccacacagtcagatccccccattgccaggcatgagcaggagcaattcagttgggatccaggatgcctttaatgatggaagtgactccacattccagaagcggaattccatgactccaaaccctgggtatcagcccagtatgaatacctctgacatgatggggcgcatgtcctatgagccaaataaggatccttatggcagcatgaggaaagctccagggagtgatcccttcatgtcctcagggcagggccccaacggcgggatgggtgacccctacagtcgtgctgccggccctgggctaggaaatgtggcgatgggaccacgacagcactatccctatggaggtccttatgacagagtgaggacggagcctggaatagggcctgagggaaacatgagcactggggccccacagccgaatctcatgccttccaacccagactcggggatgtattctcctagccgctaccccccgcagcagcagcagcagcagcagcaacgacatgattcctatggcaatcagttctccacccaaggcaccccttctggcagccccttccccagccagcagactacaatgtatcaacagcaacagcagaattacaagcggccaatggatggcacatatggccctcctgccaagcggcacgaaggggagatgtacagcgtgccatacagcactgggcaggggcagcctcagcagcagcagttgcccccagcccagccccagcctgccagccagcaacaagctgcccagccttcccctcagcaagatgtatacaaccagtatggcaatgcctatcctgccactgccacagctgctactgagcgccgaccagcaggcggcccccagaaccaatttccattccagtttggccgagaccgtgtctctgcaccccctggcaccaatgcccagcaaaacatgccaccacaaatgatgggcggccccatacaggcatcagctgaggttgctcagcaaggcaccatgtggcaggggcgtaatgacatgacctataattatgccaacaggcagagcacgggctctgccccccagggccccgcctatcatggcgtgaaccgaacagatgaaatgctgcacacagatcagagggccaaccacgaaggctcgtggccttcccatggcacacgccagcccccatatggtccctctgcccctgtgccccccatgacaaggccccctccatctaactaccagcccccaccaagcatgcagaatcacattcctcaggtatccagccctgctcccctgccccggccaatggagaaccgcacctctcctagcaagtctccattcctgcactctgggatgaaaatgcagaaggcaggtcccccagtacctgcctcgcacatagcacctgcccctgtgcagccccccatgattcggcgggatatcaccttcccacctggctctgttgaagccacacagcctgtgttgaagcagaggaggcggctcacaatgaaagacattggaaccccggaggcatggcgggtaatgatgtccctcaagtctggtctcctggcagagagcacatgggcattagataccatcaacatcctgctgtatgatgacaacagcatcatgaccttcaacctcagtcagctcccagggttgctagagctccttgtagaatatttccgacgatgcctgattgagatctttggcattttaaaggagtatgaggtgggtgacccaggacagagaacgctactggatcctgggaggttcagcaaggtgtctagtccagctcccatggagggtggggaagaagaagaagaacttctaggtcctaaactagaagaggaagaagaagaggaagtagttgaaaatgatgaggagatagccttttcaggcaaggacaagccagcttcagagaatagtgaggagaagctgatcagtaagtttgacaagcttccagtaaagatcgtacagaagaatgatccatttgtggtggactgctcagataagcttgggcgtgtgcaggagtttgacagtgcctgctgcactggcggattggtgggggggacaccactgagcatatccagacccacttcgagagcaagacagagctgctgccttcccggcctcacgcaccctgcccaccagcccctcggaagcatgtgacaacagcagagggtacaccagggacaacagaccaggaggggcccccacctgatggacctccagaaaaacggatcacagccactatggatgacatgttgtctactcggtctagcaccttgaccgaggatggagctaagagttcagaggccatcaaggagagcagcaagtttccatttggcattagcccagcacagagccaccggaacatcaagatcctagaggacgaaccccacagtaaggatgagaccccactgtgtacccttctggactggcaggattctcttgccaagcgctgcgtctgtgtgtccaataccattcgaagcctgtcatttgtgccaggcaatgactttgagatgtccaaacacccagggctgctgctcatcctgggcaagctgatcctgctgcaccacaagcacccagaacggaagcaggcaccactaacttatgaaaaggaggaggaacaggaccaaggggtgagctgcaacaaagtggagtggtggtgggactgcttggagatgctccgggaaaacaccttggttacactcgccaacatctcggggcagttggacctatctccataccccgagagcatttgcctgcctgtcctggacggactcctacactgggcagtttgcccttcagctgaagcccaggaccccttttccaccctgggccccaatgccgtcctttccccgcagagactggtcttggaaaccctcagcaaactcagcatccaggacaacaatgtggacctgattctggccacaccccccttcagccgcctggagaagttgtatagcactatggtgcgcttcctcagtgaccgaaagaacccggtgtgccgggagatggctgtggtactgctggccaacctggctcagggggacagcctggcagctcgtgccattgcagtgcagaagggcagtatcggcaacctcctgggcttcctagaggacagccttgccgccacacagttccagcagagccaggccagcctcctccacatgcagaacccaccctttgagccaactagtgtggacatgatgcggcgggctgcccgcgcgctgcttgccttggccaaggtggacgagaaccactcagagtttactctgtacgaatcacggctgttggacatctcggtatcaccgttgatgaactcattggtttcacaagtcatttgtgatgtactgtttttgattggccagtcatgacagccgtgggacacctcccccccccgtgtgtgtgtgcgtgtgtggagaacttagaaactgactgttgccctttatttatgcaaaaccacctcagaatccagtttaccctgtgctgtccagcttctcccttgggaaaaagtctctcctgtttctctctcctccttccacctcccctccctccatcacctcacgcctttctgttccttgtcctcaccttactcccctcaggaccctaccccaccctctttgaaaagacaaagctctgcctacatagaagactttttttattttaaccaaagttactgttgtttacagtgagtttggggaaaaaaaataaaataaaaatggctttcccagtccttgcatcaacgggatgccacatttcataactgtttttaatggtaaaaaaaaaaaaaaaaaatacaaaaaaaaattctgaaggacaaaaaaggtgactgctgaactgtgtgtggtttattgttgtacattcacaatcttgcaggagccaagaagttcgcagttgtgaacagaccctgttcactggagaggcctgtgcagtagagtgtagaccctttcatgtactgtactgtacacctgatactgtaaacatactgtaataataatgtctcacatggaaacagaaaacgctgggtcagcagcaagctgtagtttttaaaaatgtttttagttaaacgttgaggagaaaaaaaaaaaaggcttttcccccaaagtatcatgtgtgaacctacaacaccctgacctctttctctcctccttgattgtatgaataaccctgagatcacctcttagaactggttttaacctttagctgcagcggctacgctgccacgtgtgtatatatatgacgttgtacattgcacatacccttggatccccacagtttggtcctcctcccagctacccctttatagtatgacgagttaacaagttggtgacctgcacaaagcgagacacagctatttaatctcttgccagatatcgcccctcttggtgcgatgctgtacaggtctctgtaaaaagtccttgctgtctcagcagccaatcaacttatagtttatttttttctgggtttttgttttgttttgttttctttctaatcgaggtgtgaaaaagttctaggttcagttgaagttctgatgaagaaacacaattgagattttttcagtgataaaatctgcatatttgtatttcaacaatgtagctaaaacttgatgtaaattcctcctttttttccttttttggcttaatgaatatcatttattcagtatgaaatctttatactatatgttccacgtgttaagaataaatgtacattaaatcttggtaagacttt

SEQ ID NO: 8 - DNA, 8585 bp, Homo sapiens
cagaaagcggagagtcacagcggggccaggccctggggagcggagcctccaccgcccccctcattcccaggcaagggcttggggggaatgagccgggagagccgggtcccgagcctacagagccgggagcagctgagccgccggcgcctcggccgccgccgccgcctcctcctcctccgccgccgccagcccggagcctgagccggcggggcgggggggagaggagcgagcgcagcgcagcagcggagccccgcgaggcccgcccgggcgggtggggagggcagcccgggggactgggccccggggcggggtgggagggggggagaagacgaagacagggccgggtctctccgcggacgagacagcggggatcatggccgcgcaggtcgcccccgccgccgccagcagcctgggcaacccgccgccgccgccgccctcggagctgaagaaagccgagcagcagcagcgggaggaggcggggggcgaggcggcggcggcggcagcggccgagcgcggggaaatgaaggcagccgccgggcaggaaagcgagggccccgccgtggggccgccgcagccgctgggaaaggagctgcaggacggggccgagagcaatgggggtggcggcggcggcggagccggcagcggcggcgggcccggcgcggagccggacctgaagaactcgaacgggaacgcgggccctaggcccgccctgaacaataacctcacggagccgcccggcggcggcggtggcggcagcagcgatggggtgggggcgcctcctcactcagccgcggccgccttgccgcccccagcctacggcttcgggcaaccctacggccggagcccgtctgccgtcgccgccgccgcggccgccgtcttccaccaacaacatggcggacaacaaagccctggcctggcagcgctgcagagcggcggcggcgggggcctggagccctacgcggggccccagcagaactctcacgaccacggcttccccaaccaccagtacaactcctactaccccaaccgcagcgcctaccccccgcccgccccggcctacgcgctgagctccccgagaggtggcactccgggctccggcgcggcggcggctgccggctccaagccgcctccctcctccagcgcctccgcctcctcgtcgtcttcgtccttcgctcagcagcgcttcggggccatggggggaggcggcccctccgcggccggcgggggaactccccagcccaccgccacccccaccctcaaccaactgctcacgtcgcccagctcggcccggggctaccagggctaccccgggggcgactacagtggcgggccccaggacgggggcgccggcaagggcccggcggacatggcctcgcagtgttggggggctgcggcggcggcagctgcggcggcggccgcctcgggaggggcccaacaaaggagccaccacgcgcccatgagccccgggagcagcggcggcggggggcagccgctcgcccggacccctcagccatccagtccaatggatcagatgggcaagatgagacctcagccatatggcgggactaacccatactcgcagcaacagggacctccgtcaggaccgcagcaaggacatgggtacccagggcagccatacgggtcccagaccccgcagcggtacccgatgaccatgcagggcctggcgcagagtgccatgggcggcctctcttatacacagcagattcctccttatggacaacaaggccccagcgggtatggtcaacagggccagactccatattacaaccagcaaagtcctcaccctcagcagcagcagccaccctactcccagcaaccaccgtcccagacccctcatgcccaaccttcgtatcagcagcagccacagtctcaaccaccacagctccagtcctctcagcctccatactcccagcagccatcccagcctccacatcagcagtccccggctccatacccctcccagcagtcgacgacacagcagcacccccagagccagcccccctactcacagccacaggctcagtctccttaccagcagcagcaacctcagcagccagcaccctcgacgctctcccagcaggctgcgtatcctcagccccagtctcagcagtcccagcaaactgcctattcccagcagcgcttccctccaccgcaggagctatctcaagattcatttgggtctcaggcatcctcagccccctcaatgacctccagtaagggagggcaagaagatatgaacctgagccttcagtcaagaccctccagcttgcctgatctatctggttcaatagatgacctccccatggggacagaaggagctctgagtcctggagtgagcacatcagggatttccagcagccaaggagagcagagtaatccagctcagtctcctttctctcctcatacctcccctcacctgcctggcatccgaggcccttccccgtcccctgttggctctcccgccagtgttgctcagtctcgctcaggaccactctcgcctgctgcagtgccaggcaaccagatgccacctcggccacccagtggccagtcggacagcatcatgcatccttccatgaaccaatcaagcattgcccaagatcgaggttatatgcagaggaacccccagatgccccagtacagttccccccagcccggctcagccttatctccgcgtcagccttccggaggacagatacacacaggcatgggctcctaccagcagaactccatggggagctatggtccccaggggggtcagtatggcccacaaggtggctaccccaggcagccaaactataatgccttgcccaatgccaactaccccagtgcaggcatggctggaggcataaaccccatgggtgccggaggtcaaatgcatggacagcctggcatcccaccttatggcacactccctccagggaggatgagtcacgcctccatgggcaaccggccttatggccctaacatggccaatatgccacctcaggttgggtcagggatgtgtcccccaccagggggcatgaaccggaaaacccaagaaactgctgtcgccatgcatgttgctgccaactctatccaaaacaggccgccaggctaccccaatatgaatcaagggggcatgatgggaactggacctccttatggacaagggattaatagtatggctggcatgatcaaccctcagggacccccatattccatgggtggaaccatggccaacaattctgcagggatggcagccagcccagagatgatgggccttggggatgtaaagttaactccagccaccaaaatgaacaacaaggcagatgggacacccaagacagaatccaaatccaagaaatccagttcttctactacaaccaatgagaagatcaccaagttgtatgagctgggtggtgagcctgagaggaagatgtgggtggaccgttatctggccttcactgaggagaaggccatgggcatgacaaatctgcctgctgtgggtaggaaacctctggacctctatcgcctctatgtgtctgtgaaggagattggtggattgactcaggtcaacaagaacaaaaaatggcgggaacttgcaaccaacctcaatgtgggcacatcaagcagtgctgccagctccttgaaaaagcagtatatccagtgtctctatgcctttgaatgcaagattgaacggggagaagaccctcccccagacatctttgcagctgctgattccaagaagtcccagcccaagatccagcctccctctcctgcgggatcaggatctatgcaggggccccagactccccagtcaaccagcagttccatggcagaaggaggagacttaaagccaccaactccagcatccacaccacacagtcagatccccccattgccaggcatgagcaggagcaattcagttgggatccaggatgcctttaatgatggaagtgactccacattccagaagcggaattccatgactccaaaccctgggtatcagcccagtatgaatacctctgacatgatggggcgcatgtcctatgagccaaataaggatccttatggcagcatgaggaaagctccagggagtgatcccttcatgtcctcagggcagggccccaacggcgggatgggtgacccctacagtcgtgctgccggccctgggctaggaaatgtggcgatgggaccacgacagcactatccctatggaggtccttatgacagagtgaggacggagcctggaatagggcctgagggaaacatgagcactggggccccacagccgaatctcatgccttccaacccagactcggggatgtattctcctagccgctaccccccgcagcagcagcagcagcagcagcaacgacatgattcctatggcaatcagttctccacccaaggcaccccttctggcagccccttccccagccagcagactacaatgtatcaacagcaacagcagaattacaagcggccaatggatggcacatatggccctcctgccaagcggcacgaaggggagatgtacagcgtgccatacagcactgggcaggggcagcctcagcagcagcagttgcccccagcccagccccagcctgccagccagcaacaagctgcccagccttcccctcagcaagatgtatacaaccagtatggcaatgcctatcctgccactgccacagctgctactgagcgccgaccagcaggcggcccccagaaccaatttccattccagtttggccgagaccgtgtctctgcaccccctggcaccaatgcccagcaaaacatgccaccacaaatgatgggcggccccatacaggcatcagctgaggttgctcagcaaggcaccatgtggcaggggcgtaatgacatgacctataattatgccaacaggcagagcacgggctctgccccccagggccccgcctatcatggcgtgaaccgaacagatgaaatgctgcacacagatcagagggccaaccacgaaggctcgtggccttcccatggcacacgccagcccccatatggtccctctgcccctgtgccccccatgacaaggccccctccatctaactaccagcccccaccaagcatgcagaatcacattcctcaggtatccagccctgctcccctgccccggccaatggagaaccgcacctctcctagcaagtctccattcctgcactctgggatgaaaatgcagaaggcaggtcccccagtacctgcctcgcacatagcacctgcccctgtgcagccccccatgattcggcgggatatcaccttcccacctggctctgttgaagccacacagcctgtgttgaagcagaggaggcggctcacaatgaaagacattggaaccccggaggcatggcgggtaatgatgtccctcaagtctggtctcctggcagagagcacatgggcattagataccatcaacatcctgctgtatgatgacaacagcatcatgaccttcaacctcagtcagctcccagggttgctagagctccttgtagaatatttccgacgatgcctgattgagatctttggcattttaaaggagtatgaggtgggtgacccaggacagagaacgctactggatcctgggaggttcagcaaggtgtctagtccagctcccatggagggtggggaagaagaagaagaacttctaggtcctaaactagaagaggaagaagaagaggaagtagttgaaaatgatgaggagatagccttttcaggcaaggacaagccagcttcagagaatagtgaggagaagctgatcagtaagtttgacaagcttccagtaaagatcgtacagaagaatgatccatttgtggtggactgctcagataagcttgggcgtgtgcaggagtttgacagtggcctgctgcactggcggattggtgggggggacaccactgagcatatccagacccacttcgagagcaagacagagctgctgccttcccggcctcacgcaccctgcccaccagcccctcggaagcatgtgacaacagcagagggtacaccagggacaacagaccaggaggggcccccacctgatggacctccagaaaaacggatcacagccactatggatgacatgttgtctactcggtctagcaccttgaccgaggatggagctaagagttcagaggccatcaaggagagcagcaagtttccatttggcattagcccagcacagagccaccggaacatcaagatcctagaggacgaaccccacagtaaggatgagaccccactgtgtacccttctggactggcaggattctcttgccaagcgctgcgtctgtgtgtccaataccattcgaagcctgtcatttgtgccaggcaatgactttgagatgtccaaacacccagggctgctgctcatcctgggcaagctgatcctgctgcaccacaagcacccagaacggaagcaggcaccactaacttatgaaaaggaggaggaacaggaccaaggggtgagctgcaacaaagtggagtggtggtgggactgcttggagatgctccgggaaaacaccttggttacactcgccaacatctcggggcagttggacctatctccataccccgagagcatttgcctgcctgtcctggacggactcctacactgggcagtttgcccttcagctgaagcccaggaccccttttccaccctgggccccaatgccgtcctttccccgcagagactggtcttggaaaccctcagcaaactcagcatccaggacaacaatgtggacctgattctggccacaccccccttcagccgcctggagaagttgtatagcactatggtgcgcttcctcagtgaccgaaagaacccggtgtgccgggagatggctgtggtactgctggccaacctggctcagggggacagcctggcagctcgtgccattgcagtgcagaagggcagtatcggcaacctcctgggcttcctagaggacagccttgccgccacacagttccagcagagccaggccagcctcctccacatgcagaacccaccctttgagccaactagtgtggacatgatgcggcgggctgcccgcgcgctgcttgccttggccaaggtggacgagaaccactcagagtttactctgtacgaatcacggctgttggacatctcggtatcaccgttgatgaactcattggtttcacaagtcatttgtgatgtactgtttttgattggccagtcatgacagccgtgggacacctcccccccccgtgtgtgtgtgcgtgtgtggagaacttagaaactgactgttgccctttatttatgcaaaaccacctcagaatccagtttaccctgtgctgtccagcttctcccttgggaaaaagtctctcctgtttctctctcctccttccacctcccctccctccatcacctcacgcctttctgttccttgtcctcaccttactcccctcaggaccctaccccaccctctttgaaaagacaaagctctgcctacatagaagactttttttattttaaccaaagttactgttgtttacagtgagtttggggaaaaaaaataaaataaaaatggctttcccagtccttgcatcaacgggatgccacatttcataactgtttttaatggtaaaaaaaaaaaaaaaaaatacaaaaaaaaattctgaaggacaaaaaaggtgactgctgaactgtgtgtggtttattgttgtacattcacaatcttgcaggagccaagaagttcgcagttgtgaacagaccctgttcactggagaggcctgtgcagtagagtgtagaccctttcatgtactgtactgtacacctgatactgtaaacatactgtaataataatgtctcacatggaaacagaaaacgctgggtcagcagcaagctgtagtttttaaaaatgtttttagttaaacgttgaggagaaaaaaaaaaaaggcttttcccccaaagtatcatgtgtgaacctacaacaccctgacctctttctctcctccttgattgtatgaataaccctgagatcacctcttagaactggttttaacctttagctgcagcggctacgctgccacgtgtgtatatatatgacgttgtacattgcacatacccttggatccccacagtttggtcctcctcccagctacccctttatagtatgacgagttaacaagttggtgacctgcacaaagcgagacacagctatttaatctcttgccagatatcgcccctcttggtgcgatgctgtacaggtctctgtaaaaagtccttgctgtctcagcagccaatcaacttatagtttatttttttctgggtttttgttttgttttgttttctttctaatcgaggtgtgaaaaagttctaggttcagttgaagttctgatgaagaaacacaattgagattttttcagtgataaaatctgcatatttgtatttcaacaatgtagctaaaacttgatgtaaattcctcctttttttccttttttggcttaatgaatatcatttattcagtatgaaatctttatactatatgttccacgtgttaagaataaatgtacattaaatcttggtaagacttt

SEQ ID NO: 9 - DNA, 8585 bp, Homo sapiens
cagaaagcggagagtcacagcggggccaggccctggggagcggagcctccaccgcccccctcattcccaggcaagggcttggggggaatgagccgggagagccgggtcccgagcctacagagccgggagcagctgagccgccggcgcctcggccgccgccgccgcctcctcctcctccgccgccgccagcccggagcctgagccggcggggcgggggggagaggagcgagcgcagcgcagcagcggagccccgcgaggcccgcccgggcgggtggggagggcagcccgggggactgggccccggggcggggtgggagggggggagaagacgaagacagggccgggtctctccgcggacgagacagcggggatcatggccgcgcaggtcgcccccgccgccgccagcagcctgggcaacccgccgccgccgccgccctcggagctgaagaaagccgagcagcagcagcgggaggaggcggggggcgaggcggcggcggcggcagcggccgagcgcggggaaatgaaggcagccgccgggcaggaaagcgagggccccgccgtggggccgccgcagccgctgggaaaggagctgcaggacggggccgagagcaatgggggtggcggcggcggcggagccggcagcggcggcgggcccggcgcggagccggacctgaagaactcgaacgggaacgcgggccctaggcccgccctgaacaataacctcacggagccgcccggcggcggcggtggcggcagcagcgatggggtgggggcgcctcctcactcagccgcggccgccttgccgcccccagcctacggcttcgggcaaccctacggccggagcccgtctgccgtcgccgccgccgcggccgccgtcttccaccaacaacatggcggacaacaaagccctggcctggcagcgctgcagagcggcggcggcgggggcctggagccctacgcggggccccagcagaactctcacgaccacggcttccccaaccaccagtacaactcctactaccccaaccgcagcgcctaccccccgcccgccccggcctacgcgctgagctccccgagaggtggcactccgggctccggcgcggcggcggctgccggctccaagccgcctccctcctccagcgcctccgcctcctcgtcgtcttcgtccttcgctcagcagcgcttcggggccatggggggaggcggcccctccgcggccggcgggggaactccccagcccaccgccacccccaccctcaaccaactgctcacgtcgcccagctcggcccggggctaccagggctaccccgggggcgactacagtggcgggccccaggacgggggcgccggcaagggcccggcggacatggcctcgcagtgttggggggctgcggcggcggcagctgcggcggcggccgcctcgggaggggcccaacaaaggagccaccacgcgcccatgagccccgggagcagcggcggcggggggcagccgctcgcccggacccctcagccatccagtccaatggatcagatgggcaagatgagacctcagccatatggcgggactaacccatactcgcagcaacagggacctccgtcaggaccgcagcaaggacatgggtacccagggcagccatacgggtcccagaccccgcagcggtacccgatgaccatgcagggccgggcgcagagtgccatgggcggcctctcttatacacagcagattcctccttatggacaacaaggccccagctggtatggtcaacagggccagactccatattacaaccagcaaagtcctcaccctcagcagcagcagccaccctactcccagcaaccaccgtcccagacccctcatgcccaaccttcgtatcagcagcagccacagtctcaaccaccacagctccagtcctctcagcctccatactcccagcagccatcccagcctccacatcagcagtccccggctccatacccctcccagcagtcgacgacacagcagcacccccagagccagcccccctactcacagccacaggctcagtctccttaccagcagcagcaacctcagcagccagcaccctcgacgctctcccagcaggctgcgtatcctcagccccagtctcagcagtcccagcaaactgcctattcccagcagcgcttccctccaccgcaggagctatctcaagattcatttgggtctcaggcatcctcagccccctcaatgacctccagtaagggagggcaagaagatatgaacctgagccttcagtcaagaccctccagcttgcctgatctatctggttcaatagatgacctccccatggggacagaaggagctctgagtcctggagtgagcacatcagggatttccagcagccaaggagagcagagtaatccagctcagtctcctttctctcctcatacctcccctcacctgcctggcatccgaggcccttccccgtcccctgttggctctcccgccagtgttgctcagtctcgctcaggaccactctcgcctgctgcagtgccaggcaaccagatgccacctcggccacccagtggccagtcggacagcatcatgcatccttccatgaaccaatcaagcattgcccaagatcgaggttatatgcagaggaacccccagatgccccagtacagttccccccagcccggctcagccttatctccgcgtcagccttccggaggacagatacacacaggcatgggctcctaccagcagaactccatggggagctatggtccccaggggggtcagtatggcccacaaggtggctaccccaggcagccaaactataatgccttgcccaatgccaactaccccagtgcaggcatggctggaggcataaaccccatgggtgccggaggtcaaatgcatggacagcctggcatcccaccttatggcacactccctccagggaggatgagtcacgcctccatgggcaaccggccttatggccctaacatggccaatatgccacctcaggttgggtcagggatgtgtcccccaccagggggcatgaaccggaaaacccaagaaactgctgtcgccatgcatgttgctgccaactctatccaaaacaggccgccaggctaccccaatatgaatcaagggggcatgatgggaactggacctccttatggacaagggattaatagtatggctggcatgatcaaccctcagggacccccatattccatgggtggaaccatggccaacaattctgcagggatggcagccagcccagagatgatgggccttggggatgtaaagttaactccagccaccaaaatgaacaacaaggcagatgggacacccaagacagaatccaaatccaagaaatccagttcttctactacaaccaatgagaagatcaccaagttgtatgagctgggtggtgagcctgagaggaagatgtgggtggaccgttatctggccttcactgaggagaaggccatgggcatgacaaatctgcctgctgtgggtaggaaacctctggacctctatcgcctctatgtgtctgtgaaggagattggtggattgactcaggtcaacaagaacaaaaaatggcgggaacttgcaaccaacctcaatgtgggcacatcaagcagtgctgccagctccttgaaaaagcagtatatccagtgtctctatgcctttgaatgcaagattgaacggggagaagaccctcccccagacatctttgcagctgctgattccaagaagtcccagcccaagatccagcctccctctcctgcgggatcaggatctatgcaggggccccagactccccagtcaaccagcagttccatggcagaaggaggagacttaaagccaccaactccagcatccacaccacacagtcagatccccccattgccaggcatgagcaggagcaattcagttgggatccaggatgcctttaatgatggaagtgactccacattccagaagcggaattccatgactccaaaccctgggtatcagcccagtatgaatacctctgacatgatggggcgcatgtcctatgagccaaataaggatccttatggcagcatgaggaaagctccagggagtgatcccttcatgtcctcagggcagggccccaacggcgggatgggtgacccctacagtcgtgctgccggccctgggctaggaaatgtggcgatgggaccacgacagcactatccctatggaggtccttatgacagagtgaggacggagcctggaatagggcctgagggaaacatgagcactggggccccacagccgaatctcatgccttccaacccagactcggggatgtattctcctagccgctaccccccgcagcagcagcagcagcagcagcaacgacatgattcctatggcaatcagttctccacccaaggcaccccttctggcagccccttccccagccagcagactacaatgtatcaacagcaacagcagaattacaagcggccaatggatggcacatatggccctcctgccaagcggcacgaaggggagatgtacagcgtgccatacagcactgggcaggggcagcctcagcagcagcagttgcccccagcccagccccagcctgccagccagcaacaagctgcccagccttcccctcagcaagatgtatacaaccagtatggcaatgcctatcctgccactgccacagctgctactgagcgccgaccagcaggcggcccccagaaccaatttccattccagtttggccgagaccgtgtctctgcaccccctggcaccaatgcccagcaaaacatgccaccacaaatgatgggcggccccatacaggcatcagctgaggttgctcagcaaggcaccatgtggcaggggcgtaatgacatgacctataattatgccaacaggcagagcacgggctctgccccccagggccccgcctatcatggcgtgaaccgaacagatgaaatgctgcacacagatcagagggccaaccacgaaggctcgtggccttcccatggcacacgccagcccccatatggtccctctgcccctgtgccccccatgacaaggccccctccatctaactaccagcccccaccaagcatgcagaatcacattcctcaggtatccagccctgctcccctgccccggccaatggagaaccgcacctctcctagcaagtctccattcctgcactctgggatgaaaatgcagaaggcaggtcccccagtacctgcctcgcacatagcacctgcccctgtgcagccccccatgattcggcgggatatcaccttcccacctggctctgttgaagccacacagcctgtgttgaagcagaggaggcggctcacaatgaaagacattggaaccccggaggcatggcgggtaatgatgtccctcaagtctggtctcctggcagagagcacatgggcattagataccatcaacatcctgctgtatgatgacaacagcatcatgaccttcaacctcagtcagctcccagggttgctagagctccttgtagaatatttccgacgatgcctgattgagatctttggcattttaaaggagtatgaggtgggtgacccaggacagagaacgctactggatcctgggaggttcagcaaggtgtctagtccagctcccatggagggtggggaagaagaagaagaacttctaggtcctaaactagaagaggaagaagaagaggaagtagttgaaaatgatgaggagatagccttttcaggcaaggacaagccagcttcagagaatagtgaggagaagctgatcagtaagtttgacaagcttccagtaaagatcgtacagaagaatgatccatttgtggtggactgctcagataagcttgggcgtgtgcaggagtttgacagtggcctgctgcactggcggattggtgggggggacaccactgagcatatccagacccacttcgagagcaagacagagctgctgccttcccggcctcacgcaccctgcccaccagcccctcggaagcatgtgacaacagcagagggtacaccagggacaacagaccaggaggggcccccacctgatggacctccagaaaaacggatcacagccactatggatgacatgttgtctactcggtctagcaccttgaccgaggatggagctaagagttcagaggccatcaaggagagcagcaagtttccatttggcattagcccagcacagagccaccggaacatcaagatcctagaggacgaaccccacagtaaggatgagaccccactgtgtacccttctggactggcaggattctcttgccaagcgctgcgtctgtgtgtccaataccattcgaagcctgtcatttgtgccaggcaatgactttgagatgtccaaacacccagggctgctgctcatcctgggcaagctgatcctgctgcaccacaagcacccagaacggaagcaggcaccactaacttatgaaaaggaggaggaacaggaccaaggggtgagctgcaacaaagtggagtggtggtgggactgcttggagatgctccgggaaaacaccttggttacactcgccaacatctcggggcagttggacctatctccataccccgagagcatttgcctgcctgtcctggacggactcctacactgggcagtttgcccttcagctgaagcccaggaccccttttccaccctgggccccaatgccgtcctttccccgcagagactggtcttggaaaccctcagcaaactcagcatccaggacaacaatgtggacctgattctggccacaccccccttcagccgcctggagaagttgtatagcactatggtgcgcttcctcagtgaccgaaagaacccggtgtgccgggagatggctgtggtactgctggccaacctggctcagggggacagcctggcagctcgtgccattgcagtgcagaagggcagtatcggcaacctcctgggcttcctagaggacagccttgccgccacacagttccagcagagccaggccagcctcctccacatgcagaacccaccctttgagccaactagtgtggacatgatgcggcgggctgcccgcgcgctgcttgccttggccaaggtggacgagaaccactcagagtttactctgtacgaatcacggctgttggacatctcggtatcaccgttgatgaactcattggtttcacaagtcatttgtgatgtactgtttttgattggccagtcatgacagccgtgggacacctcccccccccgtgtgtgtgtgcgtgtgtggagaacttagaaactgactgttgccctttatttatgcaaaaccacctcagaatccagtttaccctgtgctgtccagcttctcccttgggaaaaagtctctcctgtttctctctcctccttccacctcccctccctccatcacctcacgcctttctgttccttgtcctcaccttactcccctcaggaccctaccccaccctctttgaaaagacaaagctctgcctacatagaagactttttttattttaaccaaagttactgttgtttacagtgagtttggggaaaaaaaataaaataaaaatggctttcccagtccttgcatcaacgggatgccacatttcataactgtttttaatggtaaaaaaaaaaaaaaaaaatacaaaaaaaaattctgaaggacaaaaaaggtgactgctgaactgtgtgtggtttattgttgtacattcacaatcttgcaggagccaagaagttcgcagttgtgaacagaccctgttcactggagaggcctgtgcagtagagtgtagaccctttcatgtactgtactgtacacctgatactgtaaacatactgtaataataatgtctcacatggaaacagaaaacgctgggtcagcagcaagctgtagtttttaaaaatgtttttagttaaacgttgaggagaaaaaaaaaaaaggcttttcccccaaagtatcatgtgtgaacctacaacaccctgacctctttctctcctccttgattgtatgaataaccctgagatcacctcttagaactggttttaacctttagctgcagcggctacgctgccacgtgtgtatatatatgacgttgtacattgcacatacccttggatccccacagtttggtcctcctcccagctacccctttatagtatgacgagttaacaagttggtgacctgcacaaagcgagacacagctatttaatctcttgccagatatcgcccctcttggtgcgatgctgtacaggtctctgtaaaaagtccttgctgtctcagcagccaatcaacttatagtttatttttttctgggtttttgttttgttttgttttctttctaatcgaggtgtgaaaaagttctaggttcagttgaagttctgatgaagaaacacaattgagattttttcagtgataaaatctgcatatttgtatttcaacaatgtagctaaaacttgatgtaaattcctcctttttttccttttttggcttaatgaatatcatttattcagtatgaaatctttatactatatgttccacgtgttaagaataaatgtacattaaatcttggtaagacttt

SEQ ID NO: 10 - DNA, 8585 bp, Homo sapiens
cagaaagcggagagtcacagcggggccaggccctggggagcggagcctccaccgcccccctcattcccaggcaagggcttggggggaatgagccgggagagccgggtcccgagcctacagagccgggagcagctgagccgccggcgcctcggccgccgccgccgcctcctcctcctccgccgccgccagcccggagcctgagccggcggggcgggggggagaggagcgagcgcagcgcagcagcggagccccgcgaggcccgcccgggcgggtggggagggcagcccgggggactgggccccggggcggggtgggagggggggagaagacgaagacagggccgggtctctccgcggacgagacagcggggatcatggccgcgcaggtcgcccccgccgccgccagcagcctgggcaacccgccgccgccgccgccctcggagctgaagaaagccgagcagcagcagcgggaggaggcggggggcgaggcggcggcggcggcagcggccgagcgcggggaaatgaaggcagccgccgggcaggaaagcgagggccccgccgtggggccgccgcagccgctgggaaaggagctgcaggacggggccgagagcaatgggggtggcggcggcggcggagccggcagcggcggcgggcccggcgcggagccggacctgaagaactcgaacgggaacgcgggccctaggcccgccctgaacaataacctcacggagccgcccggcggcggcggtggcggcagcagcgatggggtgggggcgcctcctcactcagccgcggccgccttgccgcccccagcctacggcttcgggcaaccctacggccggagcccgtctgccgtcgccgccgccgcggccgccgtcttccaccaacaacatggcggacaacaaagccctggcctggcagcgctgcagagcggcggcggcgggggcctggagccctacgcggggccccagcagaactctcacgaccacggcttccccaaccaccagtacaactcctactaccccaaccgcagcgcctaccccccgcccgccccggcctacgcgctgagctccccgagaggtggcactccgggctccggcgcggcggcggctgccggctccaagccgcctccctcctccagcgcctccgcctcctcgtcgtcttcgtccttcgctcagcagcgcttcggggccatggggggaggcggcccctccgcggccggcgggggaactccccagcccaccgccacccccaccctcaaccaactgctcacgtcgcccagctcggcccggggctaccagggctaccccgggggcgactacagtggcgggccccaggacgggggcgccggcaagggcccggcggacatggcctcgcagtgttggggggctgcggcggcggcagctgcggcggcggccgcctcgggaggggcccaacaaaggagccaccacgcgcccatgagccccgggagcagcggcggcggggggcagccgctcgcccggacccctcagccatccagtccaatggatcagatgggcaagatgagacctcagccatatggcgggactaacccatactcgcagcaacagggacctccgtcaggaccgcagcaaggacatgggtacccagggcagccatacgggtcccagaccccgcagcggtacccgatgaccatgcagggccgggcgcagagtgccatgggcggcctctcttatacacagcagattcctccttatggacaacaaggccccagcgggtatggtcaacagggccagactccatattacaaccagcaaagtcctcaccctcagcagcagcagccaccctactcccagcaaccaccgtcccagacccctcatgcccaaccttcgtatcagcatcagccacagtctcaaccaccacagctccagtcctctcagcctccatactcccagcagccatcccagcctccacatcagcagtccccggctccatacccctcccagcagtcgacgacacagcagcacccccagagccagcccccctactcacagccacaggctcagtctccttaccagcagcagcaacctcagcagccagcaccctcgacgctctcccagcaggctgcgtatcctcagccccagtctcagcagtcccagcaaactgcctattcccagcagcgcttccctccaccgcaggagctatctcaagattcatttgggtctcaggcatcctcagccccctcaatgacctccagtaagggagggcaagaagatatgaacctgagccttcagtcaagaccctccagcttgcctgatctatctggttcaatagatgacctccccatggggacagaaggagctctgagtcctggagtgagcacatcagggatttccagcagccaaggagagcagagtaatccagctcagtctcctttctctcctcatacctcccctcacctgcctggcatccgaggcccttccccgtcccctgttggctctcccgccagtgttgctcagtctcgctcaggaccactctcgcctgctgcagtgccaggcaaccagatgccacctcggccacccagtggccagtcggacagcatcatgcatccttccatgaaccaatcaagcattgcccaagatcgaggttatatgcagaggaacccccagatgccccagtacagttccccccagcccggctcagccttatctccgcgtcagccttccggaggacagatacacacaggcatgggctcctaccagcagaactccatggggagctatggtccccaggggggtcagtatggcccacaaggtggctaccccaggcagccaaactataatgccttgcccaatgccaactaccccagtgcaggcatggctggaggcataaaccccatgggtgccggaggtcaaatgcatggacagcctggcatcccaccttatggcacactccctccagggaggatgagtcacgcctccatgggcaaccggccttatggccctaacatggccaatatgccacctcaggttgggtcagggatgtgtcccccaccagggggcatgaaccggaaaacccaagaaactgctgtcgccatgcatgttgctgccaactctatccaaaacaggccgccaggctaccccaatatgaatcaagggggcatgatgggaactggacctccttatggacaagggattaatagtatggctggcatgatcaaccctcagggacccccatattccatgggtggaaccatggccaacaattctgcagggatggcagccagcccagagatgatgggccttggggatgtaaagttaactccagccaccaaaatgaacaacaaggcagatgggacacccaagacagaatccaaatccaagaaatccagttcttctactacaaccaatgagaagatcaccaagttgtatgagctgggtggtgagcctgagaggaagatgtgggtggaccgttatctggccttcactgaggagaaggccatgggcatgacaaatctgcctgctgtgggtaggaaacctctggacctctatcgcctctatgtgtctgtgaaggagattggtggattgactcaggtcaacaagaacaaaaaatggcgggaacttgcaaccaacctcaatgtgggcacatcaagcagtgctgccagctccttgaaaaagcagtatatccagtgtctctatgcctttgaatgcaagattgaacggggagaagaccctcccccagacatctttgcagctgctgattccaagaagtcccagcccaagatccagcctccctctcctgcgggatcaggatctatgcaggggccccagactccccagtcaaccagcagttccatggcagaaggaggagacttaaagccaccaactccagcatccacaccacacagtcagatccccccattgccaggcatgagcaggagcaattcagttgggatccaggatgcctttaatgatggaagtgactccacattccagaagcggaattccatgactccaaaccctgggtatcagcccagtatgaatacctctgacatgatggggcgcatgtcctatgagccaaataaggatccttatggcagcatgaggaaagctccagggagtgatcccttcatgtcctcagggcagggccccaacggcgggatgggtgacccctacagtcgtgctgccggccctgggctaggaaatgtggcgatgggaccacgacagcactatccctatggaggtccttatgacagagtgaggacggagcctggaatagggcctgagggaaacatgagcactggggccccacagccgaatctcatgccttccaacccagactcggggatgtattctcctagccgctaccccccgcagcagcagcagcagcagcagcaacgacatgattcctatggcaatcagttctccacccaaggcaccccttctggcagccccttccccagccagcagactacaatgtatcaacagcaacagcagaattacaagcggccaatggatggcacatatggccctcctgccaagcggcacgaaggggagatgtacagcgtgccatacagcactgggcaggggcagcctcagcagcagcagttgcccccagcccagccccagcctgccagccagcaacaagctgcccagccttcccctcagcaagatgtatacaaccagtatggcaatgcctatcctgccactgccacagctgctactgagcgccgaccagcaggcggcccccagaaccaatttccattccagtttggccgagaccgtgtctctgcaccccctggcaccaatgcccagcaaaacatgccaccacaaatgatgggcggccccatacaggcatcagctgaggttgctcagcaaggcaccatgtggcaggggcgtaatgacatgacctataattatgccaacaggcagagcacgggctctgccccccagggccccgcctatcatggcgtgaaccgaacagatgaaatgctgcacacagatcagagggccaaccacgaaggctcgtggccttcccatggcacacgccagcccccatatggtccctctgcccctgtgccccccatgacaaggccccctccatctaactaccagcccccaccaagcatgcagaatcacattcctcaggtatccagccctgctcccctgccccggccaatggagaaccgcacctctcctagcaagtctccattcctgcactctgggatgaaaatgcagaaggcaggtcccccagtacctgcctcgcacatagcacctgcccctgtgcagccccccatgattcggcgggatatcaccttcccacctggctctgttgaagccacacagcctgtgttgaagcagaggaggcggctcacaatgaaagacattggaaccccggaggcatggcgggtaatgatgtccctcaagtctggtctcctggcagagagcacatgggcattagataccatcaacatcctgctgtatgatgacaacagcatcatgaccttcaacctcagtcagctcccagggttgctagagctccttgtagaatatttccgacgatgcctgattgagatctttggcattttaaaggagtatgaggtgggtgacccaggacagagaacgctactggatcctgggaggttcagcaaggtgtctagtccagctcccatggagggtggggaagaagaagaagaacttctaggtcctaaactagaagaggaagaagaagaggaagtagttgaaaatgatgaggagatagccttttcaggcaaggacaagccagcttcagagaatagtgaggagaagctgatcagtaagtttgacaagcttccagtaaagatcgtacagaagaatgatccatttgtggtggactgctcagataagcttgggcgtgtgcaggagtttgacagtggcctgctgcactggcggattggtgggggggacaccactgagcatatccagacccacttcgagagcaagacagagctgctgccttcccggcctcacgcaccctgcccaccagcccctcggaagcatgtgacaacagcagagggtacaccagggacaacagaccaggaggggcccccacctgatggacctccagaaaaacggatcacagccactatggatgacatgttgtctactcggtctagcaccttgaccgaggatggagctaagagttcagaggccatcaaggagagcagcaagtttccatttggcattagcccagcacagagccaccggaacatcaagatcctagaggacgaaccccacagtaaggatgagaccccactgtgtacccttctggactggcaggattctcttgccaagcgctgcgtctgtgtgtccaataccattcgaagcctgtcatttgtgccaggcaatgactttgagatgtccaaacacccagggctgctgctcatcctgggcaagctgatcctgctgcaccacaagcacccagaacggaagcaggcaccactaacttatgaaaaggaggaggaacaggaccaaggggtgagctgcaacaaagtggagtggtggtgggactgcttggagatgctccgggaaaacaccttggttacactcgccaacatctcggggcagttggacctatctccataccccgagagcatttgcctgcctgtcctggacggactcctacactgggcagtttgcccttcagctgaagcccaggaccccttttccaccctgggccccaatgccgtcctttccccgcagagactggtcttggaaaccctcagcaaactcagcatccaggacaacaatgtggacctgattctggccacaccccccttcagccgcctggagaagttgtatagcactatggtgcgcttcctcagtgaccgaaagaacccggtgtgccgggagatggctgtggtactgctggccaacctggctcagggggacagcctggcagctcgtgccattgcagtgcagaagggcagtatcggcaacctcctgggcttcctagaggacagccttgccgccacacagttccagcagagccaggccagcctcctccacatgcagaacccaccctttgagccaactagtgtggacatgatgcggcgggctgcccgcgcgctgcttgccttggccaaggtggacgagaaccactcagagtttactctgtacgaatcacggctgttggacatctcggtatcaccgttgatgaactcattggtttcacaagtcatttgtgatgtactgtttttgattggccagtcatgacagccgtgggacacctcccccccccgtgtgtgtgtgcgtgtgtggagaacttagaaactgactgttgccctttatttatgcaaaaccacctcagaatccagtttaccctgtgctgtccagcttctcccttgggaaaaagtctctcctgtttctctctcctccttccacctcccctccctccatcacctcacgcctttctgttccttgtcctcaccttactcccctcaggaccctaccccaccctctttgaaaagacaaagctctgcctacatagaagactttttttattttaaccaaagttactgttgtttacagtgagtttggggaaaaaaaataaaataaaaatggctttcccagtccttgcatcaacgggatgccacatttcataactgtttttaatggtaaaaaaaaaaaaaaaaaatacaaaaaaaaattctgaaggacaaaaaaggtgactgctgaactgtgtgtggtttattgttgtacattcacaatcttgcaggagccaagaagttcgcagttgtgaacagaccctgttcactggagaggcctgtgcagtagagtgtagaccctttcatgtactgtactgtacacctgatactgtaaacatactgtaataataatgtctcacatggaaacagaaaacgctgggtcagcagcaagctgtagtttttaaaaatgtttttagttaaacgttgaggagaaaaaaaaaaaaggcttttcccccaaagtatcatgtgtgaacctacaacaccctgacctctttctctcctccttgattgtatgaataaccctgagatcacctcttagaactggttttaacctttagctgcagcggctacgctgccacgtgtgtatatatatgacgttgtacattgcacatacccttggatccccacagtttggtcctcctcccagctacccctttatagtatgacgagttaacaagttggtgacctgcacaaagcgagacacagctatttaatctcttgccagatatcgcccctcttggtgcgatgctgtacaggtctctgtaaaaagtccttgctgtctcagcagccaatcaacttatagtttatttttttctgggtttttgttttgttttgttttctttctaatcgaggtgtgaaaaagttctaggttcagttgaagttctgatgaagaaacacaattgagattttttcagtgataaaatctgcatatttgtatttcaacaatgtagctaaaacttgatgtaaattcctcctttttttccttttttggcttaatgaatatcatttattcagtatgaaatctttatactatatgttccacgtgttaagaataaatgtacattaaatcttggtaagacttt

SEQ ID NO: 11 - DNA, 8585 bp, Homo sapiens
cagaaagcggagagtcacagcggggccaggccctggggagcggagcctccaccgcccccctcattcccaggcaagggcttggggggaatgagccgggagagccgggtcccgagcctacagagccgggagcagctgagccgccggcgcctcggccgccgccgccgcctcctcctcctccgccgccgccagcccggagcctgagccggcggggcgggggggagaggagcgagcgcagcgcagcagcggagccccgcgaggcccgcccgggcgggtggggagggcagcccgggggactgggccccggggcggggtgggagggggggagaagacgaagacagggccgggtctctccgcggacgagacagcggggatcatggccgcgcaggtcgcccccgccgccgccagcagcctgggcaacccgccgccgccgccgccctcggagctgaagaaagccgagcagcagcagcgggaggaggcggggggcgaggcggcggcggcggcagcggccgagcgcggggaaatgaaggcagccgccgggcaggaaagcgagggccccgccgtggggccgccgcagccgctgggaaaggagctgcaggacggggccgagagcaatgggggtggcggcggcggcggagccggcagcggcggcgggcccggcgcggagccggacctgaagaactcgaacgggaacgcgggccctaggcccgccctgaacaataacctcacggagccgcccggcggcggcggtggcggcagcagcgatggggtgggggcgcctcctcactcagccgcggccgccttgccgcccccagcctacggcttcgggcaaccctacggccggagcccgtctgccgtcgccgccgccgcggccgccgtcttccaccaacaacatggcggacaacaaagccctggcctggcagcgctgcagagcggcggcggcgggggcctggagccctacgcggggccccagcagaactctcacgaccacggcttccccaaccaccagtacaactcctactaccccaaccgcagcgcctaccccccgcccgccccggcctacgcgctgagctccccgagaggtggcactccgggctccggcgcggcggcggctgccggctccaagccgcctccctcctccagcgcctccgcctcctcgtcgtcttcgtccttcgctcagcagcgcttcggggccatggggggaggcggcccctccgcggccggcgggggaactccccagcccaccgccacccccaccctcaaccaactgctcacgtcgcccagctcggcccggggctaccagggctaccccgggggcgactacagtggcgggccccaggacgggggcgccggcaagggcccggcggacatggcctcgcagtgttggggggctgcggcggcggcagctgcggcggcggccgcctcgggaggggcccaacaaaggagccaccacgcgcccatgagccccgggagcagcggcggcggggggcagccgctcgcccggacccctcagccatccagtccaatggatcagatgggcaagatgagacctcagccatatggcgggactaacccatactcgcagcaacagggacctccgtcaggaccgcagcaaggacatgggtacccagggcagccatacgggtcccagaccccgcagcggtacccgatgaccatgcagggccgggcgcagagtgccatgggcggcctctcttatacacagcagattcctccttatggacaacaaggccccagcgggtatggtcaacagggccagactccatattacaaccagcaaagtcctcaccctcagcagcagcagccaccctactcccagcaaccaccgtcccagacccctcatgcccaaccttcgtatcagcagcagccacagtctcaaccaccacagctccagtcctctcagcctccatactcccagcagccatcccagcctccacatcagcagtccccggctccatacccctcccagcagtcgacgacacagcagcacccccagagccagcccccctactcacagccacaggctcagtctcattaccagcagcagcaacctcagcagccagcaccctcgacgctctcccagcaggctgcgtatcctcagccccagtctcagcagtcccagcaaactgcctattcccagcagcgcttccctccaccgcaggagctatctcaagattcatttgggtctcaggcatcctcagccccctcaatgacctccagtaagggagggcaagaagatatgaacctgagccttcagtcaagaccctccagcttgcctgatctatctggttcaatagatgacctccccatggggacagaaggagctctgagtcctggagtgagcacatcagggatttccagcagccaaggagagcagagtaatccagctcagtctcctttctctcctcatacctcccctcacctgcctggcatccgaggcccttccccgtcccctgttggctctcccgccagtgttgctcagtctcgctcaggaccactctcgcctgctgcagtgccaggcaaccagatgccacctcggccacccagtggccagtcggacagcatcatgcatccttccatgaaccaatcaagcattgcccaagatcgaggttatatgcagaggaacccccagatgccccagtacagttccccccagcccggctcagccttatctccgcgtcagccttccggaggacagatacacacaggcatgggctcctaccagcagaactccatggggagctatggtccccaggggggtcagtatggcccacaaggtggctaccccaggcagccaaactataatgccttgcccaatgccaactaccccagtgcaggcatggctggaggcataaaccccatgggtgccggaggtcaaatgcatggacagcctggcatcccaccttatggcacactccctccagggaggatgagtcacgcctccatgggcaaccggccttatggccctaacatggccaatatgccacctcaggttgggtcagggatgtgtcccccaccagggggcatgaaccggaaaacccaagaaactgctgtcgccatgcatgttgctgccaactctatccaaaacaggccgccaggctaccccaatatgaatcaagggggcatgatgggaactggacctccttatggacaagggattaatagtatggctggcatgatcaaccctcagggacccccatattccatgggtggaaccatggccaacaattctgcagggatggcagccagcccagagatgatgggccttggggatgtaaagttaactccagccaccaaaatgaacaacaaggcagatgggacacccaagacagaatccaaatccaagaaatccagttcttctactacaaccaatgagaagatcaccaagttgtatgagctgggtggtgagcctgagaggaagatgtgggtggaccgttatctggccttcactgaggagaaggccatgggcatgacaaatctgcctgctgtgggtaggaaacctctggacctctatcgcctctatgtgtctgtgaaggagattggtggattgactcaggtcaacaagaacaaaaaatggcgggaacttgcaaccaacctcaatgtgggcacatcaagcagtgctgccagctccttgaaaaagcagtatatccagtgtctctatgcctttgaatgcaagattgaacggggagaagaccctcccccagacatctttgcagctgctgattccaagaagtcccagcccaagatccagcctccctctcctgcgggatcaggatctatgcaggggccccagactccccagtcaaccagcagttccatggcagaaggaggagacttaaagccaccaactccagcatccacaccacacagtcagatccccccattgccaggcatgagcaggagcaattcagttgggatccaggatgcctttaatgatggaagtgactccacattccagaagcggaattccatgactccaaaccctgggtatcagcccagtatgaatacctctgacatgatggggcgcatgtcctatgagccaaataaggatccttatggcagcatgaggaaagctccagggagtgatcccttcatgtcctcagggcagggccccaacggcgggatgggtgacccctacagtcgtgctgccggccctgggctaggaaatgtggcgatgggaccacgacagcactatccctatggaggtccttatgacagagtgaggacggagcctggaatagggcctgagggaaacatgagcactggggccccacagccgaatctcatgccttccaacccagactcggggatgtattctcctagccgctaccccccgcagcagcagcagcagcagcagcaacgacatgattcctatggcaatcagttctccacccaaggcaccccttctggcagccccttccccagccagcagactacaatgtatcaacagcaacagcagaattacaagcggccaatggatggcacatatggccctcctgccaagcggcacgaaggggagatgtacagcgtgccatacagcactgggcaggggcagcctcagcagcagcagttgcccccagcccagccccagcctgccagccagcaacaagctgcccagccttcccctcagcaagatgtatacaaccagtatggcaatgcctatcctgccactgccacagctgctactgagcgccgaccagcaggcggcccccagaaccaatttccattccagtttggccgagaccgtgtctctgcaccccctggcaccaatgcccagcaaaacatgccaccacaaatgatgggcggccccatacaggcatcagctgaggttgctcagcaaggcaccatgtggcaggggcgtaatgacatgacctataattatgccaacaggcagagcacgggctctgccccccagggccccgcctatcatggcgtgaaccgaacagatgaaatgctgcacacagatcagagggccaaccacgaaggctcgtggccttcccatggcacacgccagcccccatatggtccctctgcccctgtgccccccatgacaaggccccctccatctaactaccagcccccaccaagcatgcagaatcacattcctcaggtatccagccctgctcccctgccccggccaatggagaaccgcacctctcctagcaagtctccattcctgcactctgggatgaaaatgcagaaggcaggtcccccagtacctgcctcgcacatagcacctgcccctgtgcagccccccatgattcggcgggatatcaccttcccacctggctctgttgaagccacacagcctgtgttgaagcagaggaggcggctcacaatgaaagacattggaaccccggaggcatggcgggtaatgatgtccctcaagtctggtctcctggcagagagcacatgggcattagataccatcaacatcctgctgtatgatgacaacagcatcatgaccttcaacctcagtcagctcccagggttgctagagctccttgtagaatatttccgacgatgcctgattgagatctttggcattttaaaggagtatgaggtgggtgacccaggacagagaacgctactggatcctgggaggttcagcaaggtgtctagtccagctcccatggagggtggggaagaagaagaagaacttctaggtcctaaactagaagaggaagaagaagaggaagtagttgaaaatgatgaggagatagccttttcaggcaaggacaagccagcttcagagaatagtgaggagaagctgatcagtaagtttgacaagcttccagtaaagatcgtacagaagaatgatccatttgtggtggactgctcagataagcttgggcgtgtgcaggagtttgacagtggcctgctgcactggcggattggtgggggggacaccactgagcatatccagacccacttcgagagcaagacagagctgctgccttcccggcctcacgcaccctgcccaccagcccctcggaagcatgtgacaacagcagagggtacaccagggacaacagaccaggaggggcccccacctgatggacctccagaaaaacggatcacagccactatggatgacatgttgtctactcggtctagcaccttgaccgaggatggagctaagagttcagaggccatcaaggagagcagcaagtttccatttggcattagcccagcacagagccaccggaacatcaagatcctagaggacgaaccccacagtaaggatgagaccccactgtgtacccttctggactggcaggattctcttgccaagcgctgcgtctgtgtgtccaataccattcgaagcctgtcatttgtgccaggcaatgactttgagatgtccaaacacccagggctgctgctcatcctgggcaagctgatcctgctgcaccacaagcacccagaacggaagcaggcaccactaacttatgaaaaggaggaggaacaggaccaaggggtgagctgcaacaaagtggagtggtggtgggactgcttggagatgctccgggaaaacaccttggttacactcgccaacatctcggggcagttggacctatctccataccccgagagcatttgcctgcctgtcctggacggactcctacactgggcagtttgcccttcagctgaagcccaggaccccttttccaccctgggccccaatgccgtcctttccccgcagagactggtcttggaaaccctcagcaaactcagcatccaggacaacaatgtggacctgattctggccacaccccccttcagccgcctggagaagttgtatagcactatggtgcgcttcctcagtgaccgaaagaacccggtgtgccgggagatggctgtggtactgctggccaacctggctcagggggacagcctggcagctcgtgccattgcagtgcagaagggcagtatcggcaacctcctgggcttcctagaggacagccttgccgccacacagttccagcagagccaggccagcctcctccacatgcagaacccaccctttgagccaactagtgtggacatgatgcggcgggctgcccgcgcgctgcttgccttggccaaggtggacgagaaccactcagagtttactctgtacgaatcacggctgttggacatctcggtatcaccgttgatgaactcattggtttcacaagtcatttgtgatgtactgtttttgattggccagtcatgacagccgtgggacacctcccccccccgtgtgtgtgtgcgtgtgtggagaacttagaaactgactgttgccctttatttatgcaaaaccacctcagaatccagtttaccctgtgctgtccagcttctcccttgggaaaaagtctctcctgtttctctctcctccttccacctcccctccctccatcacctcacgcctttctgttccttgtcctcaccttactcccctcaggaccctaccccaccctctttgaaaagacaaagctctgcctacatagaagactttttttattttaaccaaagttactgttgtttacagtgagtttggggaaaaaaaataaaataaaaatggctttcccagtccttgcatcaacgggatgccacatttcataactgtttttaatggtaaaaaaaaaaaaaaaaaatacaaaaaaaaattctgaaggacaaaaaaggtgactgctgaactgtgtgtggtttattgttgtacattcacaatcttgcaggagccaagaagttcgcagttgtgaacagaccctgttcactggagaggcctgtgcagtagagtgtagaccctttcatgtactgtactgtacacctgatactgtaaacatactgtaataataatgtctcacatggaaacagaaaacgctgggtcagcagcaagctgtagtttttaaaaatgtttttagttaaacgttgaggagaaaaaaaaaaaaggcttttcccccaaagtatcatgtgtgaacctacaacaccctgacctctttctctcctccttgattgtatgaataaccctgagatcacctcttagaactggttttaacctttagctgcagcggctacgctgccacgtgtgtatatatatgacgttgtacattgcacatacccttggatccccacagtttggtcctcctcccagctacccctttatagtatgacgagttaacaagttggtgacctgcacaaagcgagacacagctatttaatctcttgccagatatcgcccctcttggtgcgatgctgtacaggtctctgtaaaaagtccttgctgtctcagcagccaatcaacttatagtttatttttttctgggtttttgttttgttttgttttctttctaatcgaggtgtgaaaaagttctaggttcagttgaagttctgatgaagaaacacaattgagattttttcagtgataaaatctgcatatttgtatttcaacaatgtagctaaaacttgatgtaaattcctcctttttttccttttttggcttaatgaatatcatttattcagtatgaaatctttatactatatgttccacgtgttaagaataaatgtacattaaatcttggtaagacttt

SEQ ID NO: 12 - DNA, 8585 bp, Homo sapiens
cagaaagcggagagtcacagcggggccaggccctggggagcggagcctccaccgcccccctcattcccaggcaagggcttggggggaatgagccgggagagccgggtcccgagcctacagagccgggagcagctgagccgccggcgcctcggccgccgccgccgcctcctcctcctccgccgccgccagcccggagcctgagccggcggggcgggggggagaggagcgagcgcagcgcagcagcggagccccgcgaggcccgcccgggcgggtggggagggcagcccgggggactgggccccggggcggggtgggagggggggagaagacgaagacagggccgggtctctccgcggacgagacagcggggatcatggccgcgcaggtcgcccccgccgccgccagcagcctgggcaacccgccgccgccgccgccctcggagctgaagaaagccgagcagcagcagcgggaggaggcggggggcgaggcggcggcggcggcagcggccgagcgcggggaaatgaaggcagccgccgggcaggaaagcgagggccccgccgtggggccgccgcagccgctgggaaaggagctgcaggacggggccgagagcaatgggggtggcggcggcggcggagccggcagcggcggcgggcccggcgcggagccggacctgaagaactcgaacgggaacgcgggccctaggcccgccctgaacaataacctcacggagccgcccggcggcggcggtggcggcagcagcgatggggtgggggcgcctcctcactcagccgcggccgccttgccgcccccagcctacggcttcgggcaaccctacggccggagcccgtctgccgtcgccgccgccgcggccgccgtcttccaccaacaacatggcggacaacaaagccctggcctggcagcgctgcagagcggcggcggcgggggcctggagccctacgcggggccccagcagaactctcacgaccacggcttccccaaccaccagtacaactcctactaccccaaccgcagcgcctaccccccgcccgccccggcctacgcgctgagctccccgagaggtggcactccgggctccggcgcggcggcggctgccggctccaagccgcctccctcctccagcgcctccgcctcctcgtcgtcttcgtccttcgctcagcagcgcttcggggccatggggggaggcggcccctccgcggccggcgggggaactccccagcccaccgccacccccaccctcaaccaactgctcacgtcgcccagctcggcccggggctaccagggctaccccgggggcgactacagtggcgggccccaggacgggggcgccggcaagggcccggcggacatggcctcgcagtgttggggggctgcggcggcggcagctgcggcggcggccgcctcgggaggggcccaacaaaggagccaccacgcgcccatgagccccgggagcagcggcggcggggggcagccgctcgcccggacccctcagccatccagtccaatggatcagatgggcaagatgagacctcagccatatggcgggactaacccatactcgcagcaacagggacctccgtcaggaccgcagcaaggacatgggtacccagggcagccatacgggtcccagaccccgcagcggtacccgatgaccatgcagggccgggcgcagagtgccatgggcggcctctcttatacacagcagattcctccttatggacaacaaggccccagcgggtatggtcaacagggccagactccatattacaaccagcaaagtcctcaccctcagcagcagcagccaccctactcccagcaaccaccgtcccagacccctcatgcccaaccttcgtatcagcagcagccacagtctcaaccaccacagctccagtcctctcagcctccatactcccagcagccatcccagcctccacatcagcagtccccggctccatacccctcccagcagtcgacgacacagcagcacccccagagccagcccccctactcacagccacaggctcagtctccttaccagcagcagcaacctcagcagccagcaccctcgacgctctcccagcaggctgcgtatcctcagccccagtctcagcagtcccagcaaactgcctattcccagcagcgcttccctccaccgcaggagctatctcaagattcatttgggtctcaggcatcctcagccccctcaatgacctccagtaagggagggcaagaagatatgaacctgagccttcagtcaagaccctccagcttgcctgatctatctggttcaatagatgacctccccatggggacagaaggagctctgagtcctggagtgagcacatcagggatttccagcagccaaggagagcagagtaatccagctcagtctcctttctctcctcatacctcccctcacctgcctggcatccgaggcccttccccgtcccctgttggctctcccgccagtgttgctcagtctcgctcaggaccactctcgcctgctgcagtgccaggcaaccagatgccacctcggccacccagtggccagtcggacagcatcatgcatccttccatgaaccaatcaagcattgcccaagatcgaggttatatgcagaggaacccccagatgccccagtacagttccccccagcccggctcagccttatctccgcgtcagccttccggaggacagatacacacaggcatgggctcctaccagcagaactccatggggagctatggtccccaggggggtcagtatggcccacaaggtggctaccccaggcagccaaactataatgccttgcccaatgccaactaccccagtgcaggcatggctggaggcataaaccccatgggtgccggaggtcaaatgcatggacagcctggcatcccaccttatggcacactccctccagggaggatgagtcacgcctccatgggcaaccggccttatggccctaacatggccaatatgccacctcaggttgggtcagggatgtgtcccccaccagggggcatgaaccggaaaacccaagaaactgctgtcgccatgcatgttgctgccaactctatccaaaacaggccgccaggctaccccaatatgaatcaagggggcatgatgggaactggacctcattatggacaagggattaatagtatggctggcatgatcaaccctcagggacccccatattccatgggtggaaccatggccaacaattctgcagggatggcagccagcccagagatgatgggccttggggatgtaaagttaactccagccaccaaaatgaacaacaaggcagatgggacacccaagacagaatccaaatccaagaaatccagttcttctactacaaccaatgagaagatcaccaagttgtatgagctgggtggtgagcctgagaggaagatgtgggtggaccgttatctggccttcactgaggagaaggccatgggcatgacaaatctgcctgctgtgggtaggaaacctctggacctctatcgcctctatgtgtctgtgaaggagattggtggattgactcaggtcaacaagaacaaaaaatggcgggaacttgcaaccaacctcaatgtgggcacatcaagcagtgctgccagctccttgaaaaagcagtatatccagtgtctctatgcctttgaatgcaagattgaacggggagaagaccctcccccagacatctttgcagctgctgattccaagaagtcccagcccaagatccagcctccctctcctgcgggatcaggatctatgcaggggccccagactccccagtcaaccagcagttccatggcagaaggaggagacttaaagccaccaactccagcatccacaccacacagtcagatccccccattgccaggcatgagcaggagcaattcagttgggatccaggatgcctttaatgatggaagtgactccacattccagaagcggaattccatgactccaaaccctgggtatcagcccagtatgaatacctctgacatgatggggcgcatgtcctatgagccaaataaggatccttatggcagcatgaggaaagctccagggagtgatcccttcatgtcctcagggcagggccccaacggcgggatgggtgacccctacagtcgtgctgccggccctgggctaggaaatgtggcgatgggaccacgacagcactatccctatggaggtccttatgacagagtgaggacggagcctggaatagggcctgagggaaacatgagcactggggccccacagccgaatctcatgccttccaacccagactcggggatgtattctcctagccgctaccccccgcagcagcagcagcagcagcagcaacgacatgattcctatggcaatcagttctccacccaaggcaccccttctggcagccccttccccagccagcagactacaatgtatcaacagcaacagcagaattacaagcggccaatggatggcacatatggccctcctgccaagcggcacgaaggggagatgtacagcgtgccatacagcactgggcaggggcagcctcagcagcagcagttgcccccagcccagccccagcctgccagccagcaacaagctgcccagccttcccctcagcaagatgtatacaaccagtatggcaatgcctatcctgccactgccacagctgctactgagcgccgaccagcaggcggcccccagaaccaatttccattccagtttggccgagaccgtgtctctgcaccccctggcaccaatgcccagcaaaacatgccaccacaaatgatgggcggccccatacaggcatcagctgaggttgctcagcaaggcaccatgtggcaggggcgtaatgacatgacctataattatgccaacaggcagagcacgggctctgccccccagggccccgcctatcatggcgtgaaccgaacagatgaaatgctgcacacagatcagagggccaaccacgaaggctcgtggccttcccatggcacacgccagcccccatatggtccctctgcccctgtgccccccatgacaaggccccctccatctaactaccagcccccaccaagcatgcagaatcacattcctcaggtatccagccctgctcccctgccccggccaatggagaaccgcacctctcctagcaagtctccattcctgcactctgggatgaaaatgcagaaggcaggtcccccagtacctgcctcgcacatagcacctgcccctgtgcagccccccatgattcggcgggatatcaccttcccacctggctctgttgaagccacacagcctgtgttgaagcagaggaggcggctcacaatgaaagacattggaaccccggaggcatggcgggtaatgatgtccctcaagtctggtctcctggcagagagcacatgggcattagataccatcaacatcctgctgtatgatgacaacagcatcatgaccttcaacctcagtcagctcccagggttgctagagctccttgtagaatatttccgacgatgcctgattgagatctttggcattttaaaggagtatgaggtgggtgacccaggacagagaacgctactggatcctgggaggttcagcaaggtgtctagtccagctcccatggagggtggggaagaagaagaagaacttctaggtcctaaactagaagaggaagaagaagaggaagtagttgaaaatgatgaggagatagccttttcaggcaaggacaagccagcttcagagaatagtgaggagaagctgatcagtaagtttgacaagcttccagtaaagatcgtacagaagaatgatccatttgtggtggactgctcagataagcttgggcgtgtgcaggagtttgacagtggcctgctgcactggcggattggtgggggggacaccactgagcatatccagacccacttcgagagcaagacagagctgctgccttcccggcctcacgcaccctgcccaccagcccctcggaagcatgtgacaacagcagagggtacaccagggacaacagaccaggaggggcccccacctgatggacctccagaaaaacggatcacagccactatggatgacatgttgtctactcggtctagcaccttgaccgaggatggagctaagagttcagaggccatcaaggagagcagcaagtttccatttggcattagcccagcacagagccaccggaacatcaagatcctagaggacgaaccccacagtaaggatgagaccccactgtgtacccttctggactggcaggattctcttgccaagcgctgcgtctgtgtgtccaataccattcgaagcctgtcatttgtgccaggcaatgactttgagatgtccaaacacccagggctgctgctcatcctgggcaagctgatcctgctgcaccacaagcacccagaacggaagcaggcaccactaacttatgaaaaggaggaggaacaggaccaaggggtgagctgcaacaaagtggagtggtggtgggactgcttggagatgctccgggaaaacaccttggttacactcgccaacatctcggggcagttggacctatctccataccccgagagcatttgcctgcctgtcctggacggactcctacactgggcagtttgcccttcagctgaagcccaggaccccttttccaccctgggccccaatgccgtcctttccccgcagagactggtcttggaaaccctcagcaaactcagcatccaggacaacaatgtggacctgattctggccacaccccccttcagccgcctggagaagttgtatagcactatggtgcgcttcctcagtgaccgaaagaacccggtgtgccgggagatggctgtggtactgctggccaacctggctcagggggacagcctggcagctcgtgccattgcagtgcagaagggcagtatcggcaacctcctgggcttcctagaggacagccttgccgccacacagttccagcagagccaggccagcctcctccacatgcagaacccaccctttgagccaactagtgtggacatgatgcggcgggctgcccgcgcgctgcttgccttggccaaggtggacgagaaccactcagagtttactctgtacgaatcacggctgttggacatctcggtatcaccgttgatgaactcattggtttcacaagtcatttgtgatgtactgtttttgattggccagtcatgacagccgtgggacacctcccccccccgtgtgtgtgtgcgtgtgtggagaacttagaaactgactgttgccctttatttatgcaaaaccacctcagaatccagtttaccctgtgctgtccagcttctcccttgggaaaaagtctctcctgtttctctctcctccttccacctcccctccctccatcacctcacgcctttctgttccttgtcctcaccttactcccctcaggaccctaccccaccctctttgaaaagacaaagctctgcctacatagaagactttttttattttaaccaaagttactgttgtttacagtgagtttggggaaaaaaaataaaataaaaatggctttcccagtccttgcatcaacgggatgccacatttcataactgtttttaatggtaaaaaaaaaaaaaaaaaatacaaaaaaaaattctgaaggacaaaaaaggtgactgctgaactgtgtgtggtttattgttgtacattcacaatcttgcaggagccaagaagttcgcagttgtgaacagaccctgttcactggagaggcctgtgcagtagagtgtagaccctttcatgtactgtactgtacacctgatactgtaaacatactgtaataataatgtctcacatggaaacagaaaacgctgggtcagcagcaagctgtagtttttaaaaatgtttttagttaaacgttgaggagaaaaaaaaaaaaggcttttcccccaaagtatcatgtgtgaacctacaacaccctgacctctttctctcctccttgattgtatgaataaccctgagatcacctcttagaactggttttaacctttagctgcagcggctacgctgccacgtgtgtatatatatgacgttgtacattgcacatacccttggatccccacagtttggtcctcctcccagctacccctttatagtatgacgagttaacaagttggtgacctgcacaaagcgagacacagctatttaatctcttgccagatatcgcccctcttggtgcgatgctgtacaggtctctgtaaaaagtccttgctgtctcagcagccaatcaacttatagtttatttttttctgggtttttgttttgttttgttttctttctaatcgaggtgtgaaaaagttctaggttcagttgaagttctgatgaagaaacacaattgagattttttcagtgataaaatctgcatatttgtatttcaacaatgtagctaaaacttgatgtaaattcctcctttttttccttttttggcttaatgaatatcatttattcagtatgaaatctttatactatatgttccacgtgttaagaataaatgtacattaaatcttggtaagacttt

SEQ ID NO: 13 - DNA, 8585 bp, Homo sapiens
cagaaagcggagagtcacagcggggccaggccctggggagcggagcctccaccgcccccctcattcccaggcaagggcttggggggaatgagccgggagagccgggtcccgagcctacagagccgggagcagctgagccgccggcgcctcggccgccgccgccgcctcctcctcctccgccgccgccagcccggagcctgagccggcggggcgggggggagaggagcgagcgcagcgcagcagcggagccccgcgaggcccgcccgggcgggtggggagggcagcccgggggactgggccccggggcggggtgggagggggggagaagacgaagacagggccgggtctctccgcggacgagacagcggggatcatggccgcgcaggtcgcccccgccgccgccagcagcctgggcaacccgccgccgccgccgccctcggagctgaagaaagccgagcagcagcagcgggaggaggcggggggcgaggcggcggcggcggcagcggccgagcgcggggaaatgaaggcagccgccgggcaggaaagcgagggccccgccgtggggccgccgcagccgctgggaaaggagctgcaggacggggccgagagcaatgggggtggcggcggcggcggagccggcagcggcggcgggcccggcgcggagccggacctgaagaactcgaacgggaacgcgggccctaggcccgccctgaacaataacctcacggagccgcccggcggcggcggtggcggcagcagcgatggggtgggggcgcctcctcactcagccgcggccgccttgccgcccccagcctacggcttcgggcaaccctacggccggagcccgtctgccgtcgccgccgccgcggccgccgtcttccaccaacaacatggcggacaacaaagccctggcctggcagcgctgcagagcggcggcggcgggggcctggagccctacgcggggccccagcagaactctcacgaccacggcttccccaaccaccagtacaactcctactaccccaaccgcagcgcctaccccccgcccgccccggcctacgcgctgagctccccgagaggtggcactccgggctccggcgcggcggcggctgccggctccaagccgcctccctcctccagcgcctccgcctcctcgtcgtcttcgtccttcgctcagcagcgcttcggggccatggggggaggcggcccctccgcggccggcgggggaactccccagcccaccgccacccccaccctcaaccaactgctcacgtcgcccagctcggcccggggctaccagggctaccccgggggcgactacagtggcgggccccaggacgggggcgccggcaagggcccggcggacatggcctcgcagtgttggggggctgcggcggcggcagctgcggcggcggccgcctcgggaggggcccaacaaaggagccaccacgcgcccatgagccccgggagcagcggcggcggggggcagccgctcgcccggacccctcagccatccagtccaatggatcagatgggcaagatgagacctcagccatatggcgggactaacccatactcgcagcaacagggacctccgtcaggaccgcagcaaggacatgggtacccagggcagccatacgggtcccagaccccgcagcggtacccgatgaccatgcagggccgggcgcagagtgccatgggcggcctctcttatacacagcagattcctccttatggacaacaaggccccagcgggtatggtcaacagggccagactccatattacaaccagcaaagtcctcaccctcagcagcagcagccaccctactcccagcaaccaccgtcccagacccctcatgcccaaccttcgtatcagcagcagccacagtctcaaccaccacagctccagtcctctcagcctccatactcccagcagccatcccagcctccacatcagcagtccccggctccatacccctcccagcagtcgacgacacagcagcacccccagagccagcccccctactcacagccacaggctcagtctccttaccagcagcagcaacctcagcagccagcaccctcgacgctctcccagcaggctgcgtatcctcagccccagtctcagcagtcccagcaaactgcctattcccagcagcgcttccctccaccgcaggagctatctcaagattcatttgggtctcaggcatcctcagccccctcaatgacctccagtaagggagggcaagaagatatgaacctgagccttcagtcaagaccctccagcttgcctgatctatctggttcaatagatgacctccccatggggacagaaggagctctgagtcctggagtgagcacatcagggatttccagcagccaaggagagcagagtaatccagctcagtctcctttctctcctcatacctcccctcacctgcctggcatccgaggcccttccccgtcccctgttggctctcccgccagtgttgctcagtctcgctcaggaccactctcgcctgctgcagtgccaggcaaccagatgccacctcggccacccagtggccagtcggacagcatcatgcatccttccatgaaccaatcaagcattgcccaagatcgaggttatatgcagaggaacccccagatgccccagtacagttccccccagcccggctcagccttatctccgcgtcagccttccggaggacagatacacacaggcatgggctcctaccagcagaactccatggggagctatggtccccaggggggtcagtatggcccacaaggtggctaccccaggcagccaaactataatgccttgcccaatgccaactaccccagtgcaggcatggctggaggcataaaccccatgggtgccggaggtcaaatgcatggacagcctggcatcccaccttatggcacactccctccagggaggatgagtcacgcctccatgggcaaccggccttatggccctaacatggccaatatgccacctcaggttgggtcagggatgtgtcccccaccagggggcatgaaccggaaaacccaagaaactgctgtcgccatgcatgttgctgccaactctatccaaaacaggccgccaggctaccccaatatgaatcaagggggcatgatgggaactggacctccttatggacaagggattaatagtatggctggcatgatcaaccctcagggacccccatattccatgggtggaaccatggccaacaattctgcagggatggcagccagcccagagatgatgggccttggggatgtaaagttaactccagccaccaaaatgaacaacaaggcagatgggacacccaagacagaatccaaatccaagaaatccagttcttctactacaaccaatgagaagatcaccaagttgtatgagctgggtggtgagcctgagaggaagatgtgggtggaccgttatctggccttcactgaggagaaggccatgggcatgacaaatctgcctgctgtgggtaggaaacctctggacctctatcgcctctatgtgtctgtgaaggagattggtggattgactcaggtcaacaagaacaaaaaatggcgggaacttgcaaccaacctcaatgtgggcacatcaagcagtgctgccagctccttgaaaaagcagtatatccagtgtctctatgcctttgaatgcaagattgaacggggagaagaccctcccccagacatctttgcagctgctgattccaagaagtcccagcccaagatccagcctccctctcctgcgggatcaggatctatgcaggggccccagactccccagtcaaccagcagttccatggcagaaggaggagacttaaagccaccaactccagcatccacaccacacagtcagatccccccattgccaggcatgagcaggagcaattcagttgggatccaggatgcctttaatgatggaagtgactccacattccagaagcggaattccatgactccaaaccctgggtatcagcccagtatgaatacctctgacatgatggggcgcatgtcctatgagccaaataaggatccttatggcagcatgaggaaagctccagggagtgatcccttcatgtcctcagggcagggccccaacggcgggatgggtgacccctacagtcgtgctgccggccctgggctaggaaatgtggcgatgggaccacgacagcactatccctatggaggtccttatgacagagtgaggacggagcctggaatagggcctgagggaaacatgagcactggggccccacagccgaatctcatgccttccaacccagactcggggatgtattctcctagccgctaccccccgcagcagcagcagcagcagcagcaacgacatgattcctatggcaatcagttctccacccaaggcaccccttctggcagccccttccccagccagcagactacaatgtatcaacagcaacagcagaattacaagcggccaatggatggcacatatggccctcctgccaagcggcacgaaggggagatgtacagcgtgccatacagcactgggcaggggcagcctcagcagcagcagttgcccccagcccagccccagcctgccagccagcaacaagctgcccagccttcccctcagcaagatgtatacaaccagtatggcaatgcctatcctgccactgccacagctgctactgagcgccgaccagcaggcggcccccagaaccaatttccattccagtttggccgagaccgtgtctctgcaccccctggcaccaatgcccagcaaaacatgccaccacaaatgatgggcggccccatacaggcatcagctgaggttgctcagcaaggcaccatgtggcaggggcgtaatgacatgacctataattatgccaacaggcagagcacgggctctgccccccagggccccgcctatcatggcgtgaaccgaacagatgaaatgctgcacacagatcagagggccaaccacgaaggctcgtggccttcccatggcacacgccagcccccatatggtccctctgcccctgtgccccccatgacaaggccccctccatctaactaccagcccccaccaagcatgcagaatcacattcctcaggtatccagccctgctcccctgccccggccaatggagaaccgcacctctcctagcaagtctccattcctgcactctgggatgaaaatgcagaaggcaggtcccccagtacctgcctcgcacatagcacctgcccctgtgcagccccccatgattcggcgggatatcaccttcccacctggctctgttgaagccacacagcctgtgttgaagcagaggaggcggctcacaatgaaagacattggaaccccggaggcatggcgggtaatgatgtccctcaagtctggtctcctggcagagagcacatgggcattagataccatcaacatcctgctgtatgatgacaacagcatcatgaccttcaacctcagtcagctcccagggttgctagagctccttgtagaatatttccgacgatgcctgattgagatctttggcattttaaaggagtatgaggtgggtgacccaggacagagaacgctactggatcctgggaggttcagcaaggtgtctagtccagctcccatggagggtggggaagaagaagaagaacttctaggtcctaaactagaagaggaagaagaagaggaagtagttgaaaatgatgaggagatagccttttcaggcaaggacaagccagcttcagagaatagtgaggagaagctgatcagtaagtttgacaagcttccagtaaagatcgtacagaagaatgatccatttgtggtggactgctcagataagcttgggcgtgtgcaggagtttgacagtggcctgctgcactggcggattggtgggggggacaccactgagcatatccagacccacttcgagagcaagacagagctgctgccttcccggcctcacgcaccctgcccaccagcccctcggaagcatgtgacaacagcagagggtacaccagggacaacagaccaggaggggcccccacctgatggacctccagaaaaacggatcacagccactatggatgacatgttgtctactcggtctagcaccttgaccgaggatggagctaagagttcagaggccatcaaggagagcagcaagtttccatttggcattagcccagcacagagccaccggaacatcaagatcctagaggacgaaccccacagtaaggatgagaccccactgtgtacccttctggactggcaggattctcttgccaagcgctgcgtctgtgtgtccaataccattcgaagcctgtcatttgtgccaggcaatgactttgagatgtccaaacacccagggctgctgctcatcctgggcaagctgatcctgctgcaccacaagcacccagaacggaagcaggcaccactaacttatgaaaaggaggaggaacaggaccaatgggtgagctgcaacaaagtggagtggtggtgggactgcttggagatgctccgggaaaacaccttggttacactcgccaacatctcggggcagttggacctatctccataccccgagagcatttgcctgcctgtcctggacggactcctacactgggcagtttgcccttcagctgaagcccaggaccccttttccaccctgggccccaatgccgtcctttccccgcagagactggtcttggaaaccctcagcaaactcagcatccaggacaacaatgtggacctgattctggccacaccccccttcagccgcctggagaagttgtatagcactatggtgcgcttcctcagtgaccgaaagaacccggtgtgccgggagatggctgtggtactgctggccaacctggctcagggggacagcctggcagctcgtgccattgcagtgcagaagggcagtatcggcaacctcctgggcttcctagaggacagccttgccgccacacagttccagcagagccaggccagcctcctccacatgcagaacccaccctttgagccaactagtgtggacatgatgcggcgggctgcccgcgcgctgcttgccttggccaaggtggacgagaaccactcagagtttactctgtacgaatcacggctgttggacatctcggtatcaccgttgatgaactcattggtttcacaagtcatttgtgatgtactgtttttgattggccagtcatgacagccgtgggacacctcccccccccgtgtgtgtgtgcgtgtgtggagaacttagaaactgactgttgccctttatttatgcaaaaccacctcagaatccagtttaccctgtgctgtccagcttctcccttgggaaaaagtctctcctgtttctctctcctccttccacctcccctccctccatcacctcacgcctttctgttccttgtcctcaccttactcccctcaggaccctaccccaccctctttgaaaagacaaagctctgcctacatagaagactttttttattttaaccaaagttactgttgtttacagtgagtttggggaaaaaaaataaaataaaaatggctttcccagtccttgcatcaacgggatgccacatttcataactgtttttaatggtaaaaaaaaaaaaaaaaaatacaaaaaaaaattctgaaggacaaaaaaggtgactgctgaactgtgtgtggtttattgttgtacattcacaatcttgcaggagccaagaagttcgcagttgtgaacagaccctgttcactggagaggcctgtgcagtagagtgtagaccctttcatgtactgtactgtacacctgatactgtaaacatactgtaataataatgtctcacatggaaacagaaaacgctgggtcagcagcaagctgtagtttttaaaaatgtttttagttaaacgttgaggagaaaaaaaaaaaaggcttttcccccaaagtatcatgtgtgaacctacaacaccctgacctctttctctcctccttgattgtatgaataaccctgagatcacctcttagaactggttttaacctttagctgcagcggctacgctgccacgtgtgtatatatatgacgttgtacattgcacatacccttggatccccacagtttggtcctcctcccagctacccctttatagtatgacgagttaacaagttggtgacctgcacaaagcgagacacagctatttaatctcttgccagatatcgcccctcttggtgcgatgctgtacaggtctctgtaaaaagtccttgctgtctcagcagccaatcaacttatagtttatttttttctgggtttttgttttgttttgttttctttctaatcgaggtgtgaaaaagttctaggttcagttgaagttctgatgaagaaacacaattgagattttttcagtgataaaatctgcatatttgtatttcaacaatgtagctaaaacttgatgtaaattcctcctttttttccttttttggcttaatgaatatcatttattcagtatgaaatctttatactatatgttccacgtgttaagaataaatgtacattaaatcttggtaagacttt

SEQ ID NO: 14 - DNA, 8585 bp, Homo sapiens
cagaaagcggagagtcacagcggggccaggccctggggagcggagcctccaccgcccccctcattcccaggcaagggcttggggggaatgagccgggagagccgggtcccgagcctacagagccgggagcagctgagccgccggcgcctcggccgccgccgccgcctcctcctcctccgccgccgccagcccggagcctgagccggcggggcgggggggagaggagcgagcgcagcgcagcagcggagccccgcgaggcccgcccgggcgggtggggagggcagcccgggggactgggccccggggcggggtgggagggggggagaagacgaagacagggccgggtctctccgcggacgagacagcggggatcatggccgcgcaggtcgcccccgccgccgccagcagcctgggcaacccgccgccgccgccgccctcggagctgaagaaagccgagcagcagcagcgggaggaggcggggggcgaggcggcggcggcggcagcggccgagcgcggggaaatgaaggcagccgccgggcaggaaagcgagggccccgccgtggggccgccgcagccgctgggaaaggagctgcaggacggggccgagagcaatgggggtggcggcggcggcggagccggcagcggcggcgggcccggcgcggagccggacctgaagaactcgaacgggaacgcgggccctaggcccgccctgaacaataacctcacggagccgcccggcggcggcggtggcggcagcagcgatggggtgggggcgcctcctcactcagccgcggccgccttgccgcccccagcctacggcttcgggcaaccctacggccggagcccgtctgccgtcgccgccgccgcggccgccgtcttccaccaacaacatggcggacaacaaagccctggcctggcagcgctgcagagcggcggcggcgggggcctggagccctacgcggggccccagcagaactctcacgaccacggcttccccaaccaccagtacaactcctactaccccaaccgcagcgcctaccccccgcccgccccggcctacgcgctgagctccccgagaggtggcactccgggctccggcgcggcggcggctgccggctccaagccgcctccctcctccagcgcctccgcctcctcgtcgtcttcgtccttcgctcagcagcgcttcggggccatggggggaggcggcccctccgcggccggcgggggaactccccagcccaccgccacccccaccctcaaccaactgctcacgtcgcccagctcggcccggggctaccagggctaccccgggggcgactacagtggcgggccccaggacgggggcgccggcaagggcccggcggacatggcctcgcagtgttggggggctgcggcggcggcagctgcggcggcggccgcctcgggaggggcccaacaaaggagccaccacgcgcccatgagccccgggagcagcggcggcggggggcagccgctcgcccggacccctcagccatccagtccaatggatcagatgggcaagatgagacctcagccatatggcgggactaacccatactcgcagcaacagggacctccgtcaggaccgcagcaaggacatgggtacccagggcagccatacgggtcccagaccccgcagcggtacccgatgaccatgcagggccgggcgcagagtgccatgggcggcctctcttatacacagcagattcctccttatggacaacaaggccccagcgggtatggtcaacagggccagactccatattacaaccagcaaagtcctcaccctcagcagcagcagccaccctactcccagcaaccaccgtcccagacccctcatgcccaaccttcgtatcagcagcagccacagtctcaaccaccacagctccagtcctctcagcctccatactcccagcagccatcccagcctccacatcagcagtccccggctccatacccctcccagcagtcgacgacacagcagcacccccagagccagcccccctactcacagccacaggctcagtctccttaccagcagcagcaacctcagcagccagcaccctcgacgctctcccagcaggctgcgtatcctcagccccagtctcagcagtcccagcaaactgcctattcccagcagcgcttccctccaccgcaggagctatctcaagattcatttgggtctcaggcatcctcagccccctcaatgacctccagtaagggagggcaagaagatatgaacctgagccttcagtcaagaccctccagcttgcctgatctatctggttcaatagatgacctccccatggggacagaaggagctctgagtcctggagtgagcacatcagggatttccagcagccaaggagagcagagtaatccagctcagtctcctttctctcctcatacctcccctcacctgcctggcatccgaggcccttccccgtcccctgttggctctcccgccagtgttgctcagtctcgctcaggaccactctcgcctgctgcagtgccaggcaaccagatgccacctcggccacccagtggccagtcggacagcatcatgcatccttccatgaaccaatcaagcattgcccaagatcgaggttatatgcagaggaacccccagatgccccagtacagttccccccagcccggctcagccttatctccgcgtcagccttccggaggacagatacacacaggcatgggctcctaccagcagaactccatggggagctatggtccccaggggggtcagtatggcccacaaggtggctaccccaggcagccaaactataatgccttgcccaatgccaactaccccagtgcaggcatggctggaggcataaaccccatgggtgccggaggtcaaatgcatggacagcctggcatcccaccttatggcacactccctccagggaggatgagtcacgcctccatgggcaaccggccttatggccctaacatggccaatatgccacctcaggttgggtcagggatgtgtcccccaccagggggcatgaaccggaaaacccaagaaactgctgtcgccatgcatgttgctgccaactctatccaaaacaggccgccaggctaccccaatatgaatcaagggggcatgatgggaactggacctccttatggacaagggattaatagtatggctggcatgatcaaccctcagggacccccatattccatgggtggaaccatggccaacaattctgcagggatggcagccagcccagagatgatgggccttggggatgtaaagttaactccagccaccaaaatgaacaacaaggcagatgggacacccaagacagaatccaaatccaagaaatccagttcttctactacaaccaatgagaagatcaccaagttgtatgagctgggtggtgagcctgagaggaagatgtgggtggaccgttatctggccttcactgaggagaaggccatgggcatgacaaatctgcctgctgtgggtaggaaacctctggacctctatcgcctctatgtgtctgtgaaggagattggtggattgactcaggtcaacaagaacaaaaaatggcgggaacttgcaaccaacctcaatgtgggcacatcaagcagtgctgccagctccttgaaaaagcagtatatccagtgtctctatgcctttgaatgcaagattgaacggggagaagaccctcccccagacatctttgcagctgctgattccaagaagtcccagcccaagatccagcctccctctcctgcgggatcaggatctatgcaggggccccagactccccagtcaaccagcagttccatggcagaaggaggagacttaaagccaccaactccagcatccacaccacacagtcagatccccccattgccaggcatgagcaggagcaattcagttgggatccaggatgcctttaatgatggaagtgactccacattccagaagcggaattccatgactccaaaccctgggtatcagcccagtatgaatacctctgacatgatggggcgcatgtcctatgagccaaataaggatccttatggcagcatgaggaaagctccagggagtgatcccttcatgtcctcagggcagggccccaacggcgggatgggtgacccctacagtcgtgctgccggccctgggctaggaaatgtggcgatgggaccacgacagcactatccctatggaggtccttatgacagagtgaggacggagcctggaatagggcctgagggaaacatgagcactggggccccacagccgaatctcatgccttccaacccagactcggggatgtattctcctagccgctaccccccgcagcagcagcagcagcagcagcaacgacatgattcctatggcaatcagttctccacccaaggcaccccttctggcagccccttccccagccagcagactacaatgtatcaacagcaacagcagaattacaagcggccaatggatggcacatatggccctcctgccaagcggcacgaaggggagatgtacagcgtgccatacagcactgggcaggggcagcctcagcagcagcagttgcccccagcccagccccagcctgccagccagcaacaagctgcccagccttcccctcagcaagatgtatacaaccagtatggcaatgcctatcctgccactgccacagctgctactgagcgccgaccagcaggcggcccccagaaccaatttccattccagtttggccgagaccgtgtctctgcaccccctggcaccaatgcccagcaaaacatgccaccacaaatgatgggcggccccatacaggcatcagctgaggttgctcagcaaggcaccatgtggcaggggcgtaatgacatgacctataattatgccaacaggcagagcacgggctctgccccccagggccccgcctatcatggcgtgaaccgaacagatgaaatgctgcacacagatcagagggccaaccacgaaggctcgtggccttcccatggcacacgccagcccccatatggtccctctgcccctgtgccccccatgacaaggccccctccatctaactaccagcccccaccaagcatgcagaatcacattcctcaggtatccagccctgctcccctgccccggccaatggagaaccgcacctctcctagcaagtctccattcctgcactctgggatgaaaatgcagaaggcaggtcccccagtacctgcctcgcacatagcacctgcccctgtgcagccccccatgattcggcgggatatcaccttcccacctggctctgttgaagccacacagcctgtgttgaagcagaggaggcggctcacaatgaaagacattggaaccccggaggcatggcgggtaatgatgtccctcaagtctggtctcctggcagagagcacatgggcattagataccatcaacatcctgctgtatgatgacaacagcatcatgaccttcaacctcagtcagctcccagggttgctagagctccttgtagaatatttccgacgatgcctgattgagatctttggcattttaaaggagtatgaggtgggtgacccaggacagagaacgctactggatcctgggaggttcagcaaggtgtctagtccagctcccatggagggtggggaagaagaagaagaacttctaggtcctaaactagaagaggaagaagaagaggaagtagttgaaaatgatgaggagatagccttttcaggcaaggacaagccagcttcagagaatagtgaggagaagctgatcagtaagtttgacaagcttccagtaaagatcgtacagaagaatgatccatttgtggtggactgctcagataagcttgggcgtgtgcaggagtttgacagtggcctgctgcactggcggattggtgggggggacaccactgagcatatccagacccacttcgagagcaagacagagctgctgccttcccggcctcacgcaccctgcccaccagcccctcggaagcatgtgacaacagcagagggtacaccagggacaacagaccaggaggggcccccacctgatggacctccagaaaaacggatcacagccactatggatgacatgttgtctactcggtctagcaccttgaccgaggatggagctaagagttcagaggccatcaaggagagcagcaagtttccatttggcattagcccagcacagagccaccggaacatcaagatcctagaggacgaaccccacagtaaggatgagaccccactgtgtacccttctggactggcaggattctcttgccaagcgctgcgtctgtgtgtccaataccattcgaagcctgtcatttgtgccaggcaatgactttgagatgtccaaacacccagggctgctgctcatcctgggcaagctgatcctgctgcaccacaagcacccagaacggaagcaggcaccactaacttatgaaaaggaggaggaacaggaccaaggggtgagctgcaacaaagtggagtggtggtggtactgcttggagatgctccgggaaaacaccttggttacactcgccaacatctcggggcagttggacctatctccataccccgagagcatttgcctgcctgtcctggacggactcctacactgggcagtttgcccttcagctgaagcccaggaccccttttccaccctgggccccaatgccgtcctttccccgcagagactggtcttggaaaccctcagcaaactcagcatccaggacaacaatgtggacctgattctggccacaccccccttcagccgcctggagaagttgtatagcactatggtgcgcttcctcagtgaccgaaagaacccggtgtgccgggagatggctgtggtactgctggccaacctggctcagggggacagcctggcagctcgtgccattgcagtgcagaagggcagtatcggcaacctcctgggcttcctagaggacagccttgccgccacacagttccagcagagccaggccagcctcctccacatgcagaacccaccctttgagccaactagtgtggacatgatgcggcgggctgcccgcgcgctgcttgccttggccaaggtggacgagaaccactcagagtttactctgtacgaatcacggctgttggacatctcggtatcaccgttgatgaactcattggtttcacaagtcatttgtgatgtactgtttttgattggccagtcatgacagccgtgggacacctcccccccccgtgtgtgtgtgcgtgtgtggagaacttagaaactgactgttgccctttatttatgcaaaaccacctcagaatccagtttaccctgtgctgtccagcttctcccttgggaaaaagtctctcctgtttctctctcctccttccacctcccctccctccatcacctcacgcctttctgttccttgtcctcaccttactcccctcaggaccctaccccaccctctttgaaaagacaaagctctgcctacatagaagactttttttattttaaccaaagttactgttgtttacagtgagtttggggaaaaaaaataaaataaaaatggctttcccagtccttgcatcaacgggatgccacatttcataactgtttttaatggtaaaaaaaaaaaaaaaaaatacaaaaaaaaattctgaaggacaaaaaaggtgactgctgaactgtgtgtggtttattgttgtacattcacaatcttgcaggagccaagaagttcgcagttgtgaacagaccctgttcactggagaggcctgtgcagtagagtgtagaccctttcatgtactgtactgtacacctgatactgtaaacatactgtaataataatgtctcacatggaaacagaaaacgctgggtcagcagcaagctgtagtttttaaaaatgtttttagttaaacgttgaggagaaaaaaaaaaaaggcttttcccccaaagtatcatgtgtgaacctacaacaccctgacctctttctctcctccttgattgtatgaataaccctgagatcacctcttagaactggttttaacctttagctgcagcggctacgctgccacgtgtgtatatatatgacgttgtacattgcacatacccttggatccccacagtttggtcctcctcccagctacccctttatagtatgacgagttaacaagttggtgacctgcacaaagcgagacacagctatttaatctcttgccagatatcgcccctcttggtgcgatgctgtacaggtctctgtaaaaagtccttgctgtctcagcagccaatcaacttatagtttatttttttctgggtttttgttttgttttgttttctttctaatcgaggtgtgaaaaagttctaggttcagttgaagttctgatgaagaaacacaattgagattttttcagtgataaaatctgcatatttgtatttcaacaatgtagctaaaacttgatgtaaattcctcctttttttccttttttggcttaatgaatatcatttattcagtatgaaatctttatactatatgttccacgtgttaagaataaatgtacattaaatcttggtaagacttt

SEQ ID NO: 15 - DNA, 8585 bp, Homo sapiens
cagaaagcggagagtcacagcggggccaggccctggggagcggagcctccaccgcccccctcattcccaggcaagggcttggggggaatgagccgggagagccgggtcccgagcctacagagccgggagcagctgagccgccggcgcctcggccgccgccgccgcctcctcctcctccgccgccgccagcccggagcctgagccggcggggcgggggggagaggagcgagcgcagcgcagcagcggagccccgcgaggcccgcccgggcgggtggggagggcagcccgggggactgggccccggggcggggtgggagggggggagaagacgaagacagggccgggtctctccgcggacgagacagcggggatcatggccgcgcaggtcgcccccgccgccgccagcagcctgggcaacccgccgccgccgccgccctcggagctgaagaaagccgagcagcagcagcgggaggaggcggggggcgaggcggcggcggcggcagcggccgagcgcggggaaatgaaggcagccgccgggcaggaaagcgagggccccgccgtggggccgccgcagccgctgggaaaggagctgcaggacggggccgagagcaatgggggtggcggcggcggcggagccggcagcggcggcgggcccggcgcggagccggacctgaagaactcgaacgggaacgcgggccctaggcccgccctgaacaataacctcacggagccgcccggcggcggcggtggcggcagcagcgatggggtgggggcgcctcctcactcagccgcggccgccttgccgcccccagcctacggcttcgggcaaccctacggccggagcccgtctgccgtcgccgccgccgcggccgccgtcttccaccaacaacatggcggacaacaaagccctggcctggcagcgctgcagagcggcggcggcgggggcctggagccctacgcggggccccagcagaactctcacgaccacggcttccccaaccaccagtacaactcctactaccccaaccgcagcgcctaccccccgcccgccccggcctacgcgctgagctccccgagaggtggcactccgggctccggcgcggcggcggctgccggctccaagccgcctccctcctccagcgcctccgcctcctcgtcgtcttcgtccttcgctcagcagcgcttcggggccatggggggaggcggcccctccgcggccggcgggggaactccccagcccaccgccacccccaccctcaaccaactgctcacgtcgcccagctcggcccggggctaccagggctaccccgggggcgactacagtggcgggccccaggacgggggcgccggcaagggcccggcggacatggcctcgcagtgttggggggctgcggcggcggcagctgcggcggcggccgcctcgggaggggcccaacaaaggagccaccacgcgcccatgagccccgggagcagcggcggcggggggcagccgctcgcccggacccctcagccatccagtccaatggatcagatgggcaagatgagacctcagccatatggcgggactaacccatactcgcagcaacagggacctccgtcaggaccgcagcaaggacatgggtacccagggcagccatacgggtcccagaccccgcagcggtacccgatgaccatgcagggccgggcgcagagtgccatgggcggcctctcttatacacagcagattcctccttatggacaacaaggccccagcgggtatggtcaacagggccagactccatattacaaccagcaaagtcctcaccctcagcagcagcagccaccctactcccagcaaccaccgtcccagacccctcatgcccaaccttcgtatcagcagcagccacagtctcaaccaccacagctccagtcctctcagcctccatactcccagcagccatcccagcctccacatcagcagtccccggctccatacccctcccagcagtcgacgacacagcagcacccccagagccagcccccctactcacagccacaggctcagtctccttaccagcagcagcaacctcagcagccagcaccctcgacgctctcccagcaggctgcgtatcctcagccccagtctcagcagtcccagcaaactgcctattcccagcagcgcttccctccaccgcaggagctatctcaagattcatttgggtctcaggcatcctcagccccctcaatgacctccagtaagggagggcaagaagatatgaacctgagccttcagtcaagaccctccagcttgcctgatctatctggttcaatagatgacctccccatggggacagaaggagctctgagtcctggagtgagcacatcagggatttccagcagccaaggagagcagagtaatccagctcagtctcctttctctcctcatacctcccctcacctgcctggcatccgaggcccttccccgtcccctgttggctctcccgccagtgttgctcagtctcgctcaggaccactctcgcctgctgcagtgccaggcaaccagatgccacctcggccacccagtggccagtcggacagcatcatgcatccttccatgaaccaatcaagcattgcccaagatcgaggttatatgcagaggaacccccagatgccccagtacagttccccccagcccggctcagccttatctccgcgtcagccttccggaggacagatacacacaggcatgggctcctaccagcagaactccatggggagctatggtccccaggggggtcagtatggcccacaaggtggctaccccaggcagccaaactataatgccttgcccaatgccaactaccccagtgcaggcatggctggaggcataaaccccatgggtgccggaggtcaaatgcatggacagcctggcatcccaccttatggcacactccctccagggaggatgagtcacgcctccatgggcaaccggccttatggccctaacatggccaatatgccacctcaggttgggtcagggatgtgtcccccaccagggggcatgaaccggaaaacccaagaaactgctgtcgccatgcatgttgctgccaactctatccaaaacaggccgccaggctaccccaatatgaatcaagggggcatgatgggaactggacctccttatggacaagggattaatagtatggctggcatgatcaaccctcagggacccccatattccatgggtggaaccatggccaacaattctgcagggatggcagccagcccagagatgatgggccttggggatgtaaagttaactccagccaccaaaatgaacaacaaggcagatgggacacccaagacagaatccaaatccaagaaatccagttcttctactacaaccaatgagaagatcaccaagttgtatgagctgggtggtgagcctgagaggaagatgtgggtggaccgttatctggccttcactgaggagaaggccatgggcatgacaaatctgcctgctgtgggtaggaaacctctggacctctatcgcctctatgtgtctgtgaaggagattggtggattgactcaggtcaacaagaacaaaaaatggcgggaacttgcaaccaacctcaatgtgggcacatcaagcagtgctgccagctccttgaaaaagcagtatatccagtgtctctatgcctttgaatgcaagattgaacggggagaagaccctcccccagacatctttgcagctgctgattccaagaagtcccagcccaagatccagcctccctctcctgcgggatcaggatctatgcaggggccccagactccccagtcaaccagcagttccatggcagaaggaggagacttaaagccaccaactccagcatccacaccacacagtcagatccccccattgccaggcatgagcaggagcaattcagttgggatccaggatgcctttaatgatggaagtgactccacattccagaagcggaattccatgactccaaaccctgggtatcagcccagtatgaatacctctgacatgatggggcgcatgtcctatgagccaaataaggatccttatggcagcatgaggaaagctccagggagtgatcccttcatgtcctcagggcagggccccaacggcgggatgggtgacccctacagtcgtgctgccggccctgggctaggaaatgtggcgatgggaccacgacagcactatccctatggaggtccttatgacagagtgaggacggagcctggaatagggcctgagggaaacatgagcactggggccccacagccgaatctcatgccttccaacccagactcggggatgtattctcctagccgctaccccccgcagcagcagcagcagcagcagcaacgacatgattcctatggcaatcagttctccacccaaggcaccccttctggcagccccttccccagccagcagactacaatgtatcaacagcaacagcagaattacaagcggccaatggatggcacatatggccctcctgccaagcggcacgaaggggagatgtacagcgtgccatacagcactgggcaggggcagccttagcagcagcagttgcccccagcccagccccagcctgccagccagcaacaagctgcccagccttcccctcagcaagatgtatacaaccagtatggcaatgcctatcctgccactgccacagctgctactgagcgccgaccagcaggcggcccccagaaccaatttccattccagtttggccgagaccgtgtctctgcaccccctggcaccaatgcccagcaaaacatgccaccacaaatgatgggcggccccatacaggcatcagctgaggttgctcagcaaggcaccatgtggcaggggcgtaatgacatgacctataattatgccaacaggcagagcacgggctctgccccccagggccccgcctatcatggcgtgaaccgaacagatgaaatgctgcacacagatcagagggccaaccacgaaggctcgtggccttcccatggcacacgccagcccccatatggtccctctgcccctgtgccccccatgacaaggccccctccatctaactaccagcccccaccaagcatgcagaatcacattcctcaggtatccagccctgctcccctgccccggccaatggagaaccgcacctctcctagcaagtctccattcctgcactctgggatgaaaatgcagaaggcaggtcccccagtacctgcctcgcacatagcacctgcccctgtgcagccccccatgattcggcgggatatcaccttcccacctggctctgttgaagccacacagcctgtgttgaagcagaggaggcggctcacaatgaaagacattggaaccccggaggcatggcgggtaatgatgtccctcaagtctggtctcctggcagagagcacatgggcattagataccatcaacatcctgctgtatgatgacaacagcatcatgaccttcaacctcagtcagctcccagggttgctagagctccttgtagaatatttccgacgatgcctgattgagatctttggcattttaaaggagtatgaggtgggtgacccaggacagagaacgctactggatcctgggaggttcagcaaggtgtctagtccagctcccatggagggtggggaagaagaagaagaacttctaggtcctaaactagaagaggaagaagaagaggaagtagttgaaaatgatgaggagatagccttttcaggcaaggacaagccagcttcagagaatagtgaggagaagctgatcagtaagtttgacaagcttccagtaaagatcgtacagaagaatgatccatttgtggtggactgctcagataagcttgggcgtgtgcaggagtttgacagtggcctgctgcactggcggattggtgggggggacaccactgagcatatccagacccacttcgagagcaagacagagctgctgccttcccggcctcacgcaccctgcccaccagcccctcggaagcatgtgacaacagcagagggtacaccagggacaacagaccaggaggggcccccacctgatggacctccagaaaaacggatcacagccactatggatgacatgttgtctactcggtctagcaccttgaccgaggatggagctaagagttcagaggccatcaaggagagcagcaagtttccatttggcattagcccagcacagagccaccggaacatcaagatcctagaggacgaaccccacagtaaggatgagaccccactgtgtacccttctggactggcaggattctcttgccaagcgctgcgtctgtgtgtccaataccattcgaagcctgtcatttgtgccaggcaatgactttgagatgtccaaacacccagggctgctgctcatcctgggcaagctgatcctgctgcaccacaagcacccagaacggaagcaggcaccactaacttatgaaaaggaggaggaacaggaccaaggggtgagctgcaacaaagtggagtggtggtgggactgcttggagatgctccgggaaaacaccttggttacactcgccaacatctcggggcagttggacctatctccataccccgagagcatttgcctgcctgtcctggacggactcctacactgggcagtttgcccttcagctgaagcccaggaccccttttccaccctgggccccaatgccgtcctttccccgcagagactggtcttggaaaccctcagcaaactcagcatccaggacaacaatgtggacctgattctggccacaccccccttcagccgcctggagaagttgtatagcactatggtgcgcttcctcagtgaccgaaagaacccggtgtgccgggagatggctgtggtactgctggccaacctggctcagggggacagcctggcagctcgtgccattgcagtgcagaagggcagtatcggcaacctcctgggcttcctagaggacagccttgccgccacacagttccagcagagccaggccagcctcctccacatgcagaacccaccctttgagccaactagtgtggacatgatgcggcgggctgcccgcgcgctgcttgccttggccaaggtggacgagaaccactcagagtttactctgtacgaatcacggctgttggacatctcggtatcaccgttgatgaactcattggtttcacaagtcatttgtgatgtactgtttttgattggccagtcatgacagccgtgggacacctcccccccccgtgtgtgtgtgcgtgtgtggagaacttagaaactgactgttgccctttatttatgcaaaaccacctcagaatccagtttaccctgtgctgtccagcttctcccttgggaaaaagtctctcctgtttctctctcctccttccacctcccctccctccatcacctcacgcctttctgttccttgtcctcaccttactcccctcaggaccctaccccaccctctttgaaaagacaaagctctgcctacatagaagactttttttattttaaccaaagttactgttgtttacagtgagtttggggaaaaaaaataaaataaaaatggctttcccagtccttgcatcaacgggatgccacatttcataactgtttttaatggtaaaaaaaaaaaaaaaaaatacaaaaaaaaattctgaaggacaaaaaaggtgactgctgaactgtgtgtggtttattgttgtacattcacaatcttgcaggagccaagaagttcgcagttgtgaacagaccctgttcactggagaggcctgtgcagtagagtgtagaccctttcatgtactgtactgtacacctgatactgtaaacatactgtaataataatgtctcacatggaaacagaaaacgctgggtcagcagcaagctgtagtttttaaaaatgtttttagttaaacgttgaggagaaaaaaaaaaaaggcttttcccccaaagtatcatgtgtgaacctacaacaccctgacctctttctctcctccttgattgtatgaataaccctgagatcacctcttagaactggttttaacctttagctgcagcggctacgctgccacgtgtgtatatatatgacgttgtacattgcacatacccttggatccccacagtttggtcctcctcccagctacccctttatagtatgacgagttaacaagttggtgacctgcacaaagcgagacacagctatttaatctcttgccagatatcgcccctcttggtgcgatgctgtacaggtctctgtaaaaagtccttgctgtctcagcagccaatcaacttatagtttatttttttctgggtttttgttttgttttgttttctttctaatcgaggtgtgaaaaagttctaggttcagttgaagttctgatgaagaaacacaattgagattttttcagtgataaaatctgcatatttgtatttcaacaatgtagctaaaacttgatgtaaattcctcctttttttccttttttggcttaatgaatatcatttattcagtatgaaatctttatactatatgttccacgtgttaagaataaatgtacattaaatcttggtaagacttt

SEQ ID NO: 16 - DNA, 8586 bp, Homo sapiens
cagaaagcggagagtcacagcggggccaggccctggggagcggagcctccaccgcccccctcattcccaggcaagggcttggggggaatgagccgggagagccgggtcccgagcctacagagccgggagcagctgagccgccggcgcctcggccgccgccgccgcctcctcctcctccgccgccgccagcccggagcctgagccggcggggcgggggggagaggagcgagcgcagcgcagcagcggagccccgcgaggcccgcccgggcgggtggggagggcagcccgggggactgggccccggggcggggtgggagggggggagaagacgaagacagggccgggtctctccgcggacgagacagcggggatcatggccgcgcaggtcgcccccgccgccgccagcagcctgggcaacccgccgccgccgccgccctcggagctgaagaaagccgagcagcagcagcgggaggaggcggggggcgaggcggcggcggcggcagcggccgagcgcggggaaatgaaggcagccgccgggcaggaaagcgagggccccgccgtggggccgccgcagccgctgggaaaggagctgcaggacggggccgagagcaatgggggtggcggcggcggcggagccggcagcggcggcgggcccggcgcggagccggacctgaagaactcgaacgggaacgcgggccctaggcccgccctgaacaataacctcacggagccgcccggcggcggcggtggcggcagcagcgatggggtgggggcgcctcctcactcagccgcggccgccttgccgcccccagcctacggcttcgggcaaccctacggccggagcccgtctgccgtcgccgccgccgcggccgccgtcttccaccaacaacatggcggacaacaaagccctggcctggcagcgctgcagagcggcggcggcgggggcctggagccctacgcggggccccagcagaactctcacgaccacggcttccccaaccaccagtacaactcctactaccccaaccgcagcgcctaccccccgcccgccccggcctacgcgctgagctccccgagaggtggcactccgggctccggcgcggcggcggctgccggctccaagccgcctccctcctccagcgcctccgcctcctcgtcgtcttcgtccttcgctcagcagcgcttcggggccatggggggaggcggcccctccgcggccggcgggggaactccccagcccaccgccacccccaccctcaaccaactgctcacgtcgcccagctcggcccggggctaccagggctaccccgggggcgactacagtggcgggccccaggacgggggcgccggcaagggcccggcggacatggcctcgcagtgttggggggctgcggcggcggcagctgcggcggcggccgcctcgggaggggcccaacaaaggagccaccacgcgcccatgagccccgggagcagcggcggcggggggcagccgctcgcccggacccctcagccatccagtccaatggatcagatgggcaagatgagacctcagccatatggcgggactaacccatactcgcagcaacagggacctccgtcaggaccgcagcaaggacatgggtacccagggcagccatacgggtcccagaccccgcagcggtacccgatgaccatgcagggccgggcgcagagtgccatgggcggcctctcttatacacagcagattcctccttatggacaacaaggccccagcgggtatggtcaacagggccagactccatattacaaccagcaaagtcctcaccctcagcagcagcagccaccctactcccagcaaccaccgtcccagacccctcatgcccaaccttcgtatcagcagcagccacagtctcaaccaccacagctccagtcctctcagcctccatactcccagcagccatcccagcctccacatcagcagtccccggctccatacccctcccagcagtcgacgacacagcagcacccccagagccagcccccctactcacagccacaggctcagtctccttaccagcagcagcaacctcagcagccagcaccctcgacgctctcccagcaggctgcgtatcctcagccccagtctcagcagtcccagcaaactgcctattcccagcagcgcttccctccaccgcaggagctatctcaagattcatttgggtctcaggcatcctcagccccctcaatgacctccagtaagggagggcaagaagatatgaacctgagccttcagtcaagaccctccagcttgcctgatctatctggttcaatagatgacctccccatggggacagaaggagctctgagtcctggagtgagcacatcagggatttccagcagccaaggagagcagagtaatccagctcagtctcctttctctcctcatacctcccctcacctgcctggcatccgaggcccttccccgtcccctgttggctctcccgccagtgttgctcagtctcgctcaggaccactctcgcctgctgcagtgccaggcaaccagatgccacctcggccacccagtggccagtcggacagcatcatgcatccttccatgaaccaatcaagcattgcccaagatcgaggttatatgcagaggaacccccagatgccccagtacagttccccccagcccggctcagccttatctccgcgtcagccttccggaggacagatacacacaggcatgggctcctaccagcagaactccatggggagctatggtccccaggggggtcagtatggcccacaaggtggctaccccaggcagccaaactataatgccttgcccaatgccaactaccccagtgcaggcatggctggaggcataaaccccatgggtgccggaggtcaaatgcatggacagcctggcatcccaccttatggcacactccctccagggaggatgagtcacgcctccatgggcaaccggccttatggccctaacatggccaatatgccacctcaggttgggtcagggatgtgtcccccaccagggggcatgaaccggaaaacccaagaaactgctgtcgccatgcatgttgctgccaactctatccaaaacaggccgccaggctaccccaatatgaatcaagggggcatgatgggaactggacctccttatggacaagggattaatagtatggctggcatgatcaaccctcagggacccccatattccatgggtggaaccatggccaacaattctgcagggatggcagccagcccagagatgatgggccttggggatgtaaagttaactccagccaccaaaatgaacaacaaggcagatgggacacccaagacagaatccaaatccaagaaatccagttcttctactacaaccaatgagaagatcaccaagttgtatgagctgggtggtgagcctgagaggaagatgtgggtggaccgttatctggccttcactgaggagaaggccatgggcatgacaaatctgcctgctgtgggtaggaaacctctggacctctatcgcctctatgtgtctgtgaaggagattggtggattgactcaggtcaacaagaacaaaaaatggcgggaacttgcaaccaacctcaatgtgggcacatcaagcagtgctgccagctccttgaaaaagcagtatatccagtgtctctatgcctttgaatgcaagattgaacggggagaagaccctcccccagacatctttgcagctgctgattccaagaagtcccagcccaagatccagcctccctctcctgcgggatcaggatctatgcaggggccccagactccccagtcaaccagcagttccatggcagaaggaggagacttaaagccaccaactccagcatccacaccacacagtcagatccccccattgccaggcatgagcaggagcaattcagttgggatccaggatgcctttaatgatggaagtgactccacattccagaagcggaattccatgactccaaaccctgggtatcagcccagtatgaatacctctgacatgatggggcgcatgtcctatgagccaaataaggatccttatggcagcatgaggaaagctccagggagtgatcccttcatgtcctcagggcagggccccaacggcgggatgggtgacccctacagtcgtgctgccggccctgggctaggaaatgtggcgatgggaccacgacagcactatccctatggaggtccttatgacagagtgaggacggagcctggaatagggcctgagggaaacatgagcactggggccccacagccgaatctcatgccttccaacccagactcggggatgtattctcctagccgctaaccccccgcagcagcagcagcagcagcagcaacgacatgattcctatggcaatcagttctccacccaaggcaccccttctggcagccccttccccagccagcagactacaatgtatcaacagcaacagcagaattacaagcggccaatggatggcacatatggccctcctgccaagcggcacgaaggggagatgtacagcgtgccatacagcactgggcaggggcagcctcagcagcagcagttgcccccagcccagccccagcctgccagccagcaacaagctgcccagccttcccctcagcaagatgtatacaaccagtatggcaatgcctatcctgccactgccacagctgctactgagcgccgaccagcaggcggcccccagaaccaatttccattccagtttggccgagaccgtgtctctgcaccccctggcaccaatgcccagcaaaacatgccaccacaaatgatgggcggccccatacaggcatcagctgaggttgctcagcaaggcaccatgtggcaggggcgtaatgacatgacctataattatgccaacaggcagagcacgggctctgccccccagggccccgcctatcatggcgtgaaccgaacagatgaaatgctgcacacagatcagagggccaaccacgaaggctcgtggccttcccatggcacacgccagcccccatatggtccctctgcccctgtgccccccatgacaaggccccctccatctaactaccagcccccaccaagcatgcagaatcacattcctcaggtatccagccctgctcccctgccccggccaatggagaaccgcacctctcctagcaagtctccattcctgcactctgggatgaaaatgcagaaggcaggtcccccagtacctgcctcgcacatagcacctgcccctgtgcagccccccatgattcggcgggatatcaccttcccacctggctctgttgaagccacacagcctgtgttgaagcagaggaggcggctcacaatgaaagacattggaaccccggaggcatggcgggtaatgatgtccctcaagtctggtctcctggcagagagcacatgggcattagataccatcaacatcctgctgtatgatgacaacagcatcatgaccttcaacctcagtcagctcccagggttgctagagctccttgtagaatatttccgacgatgcctgattgagatctttggcattttaaaggagtatgaggtgggtgacccaggacagagaacgctactggatcctgggaggttcagcaaggtgtctagtccagctcccatggagggtggggaagaagaagaagaacttctaggtcctaaactagaagaggaagaagaagaggaagtagttgaaaatgatgaggagatagccttttcaggcaaggacaagccagcttcagagaatagtgaggagaagctgatcagtaagtttgacaagcttccagtaaagatcgtacagaagaatgatccatttgtggtggactgctcagataagcttgggcgtgtgcaggagtttgacagtggcctgctgcactggcggattggtgggggggacaccactgagcatatccagacccacttcgagagcaagacagagctgctgccttcccggcctcacgcaccctgcccaccagcccctcggaagcatgtgacaacagcagagggtacaccagggacaacagaccaggaggggcccccacctgatggacctccagaaaaacggatcacagccactatggatgacatgttgtctactcggtctagcaccttgaccgaggatggagctaagagttcagaggccatcaaggagagcagcaagtttccatttggcattagcccagcacagagccaccggaacatcaagatcctagaggacgaaccccacagtaaggatgagaccccactgtgtacccttctggactggcaggattctcttgccaagcgctgcgtctgtgtgtccaataccattcgaagcctgtcatttgtgccaggcaatgactttgagatgtccaaacacccagggctgctgctcatcctgggcaagctgatcctgctgcaccacaagcacccagaacggaagcaggcaccactaacttatgaaaaggaggaggaacaggaccaaggggtgagctgcaacaaagtggagtggtggtgggactgcttggagatgctccgggaaaacaccttggttacactcgccaacatctcggggcagttggacctatctccataccccgagagcatttgcctgcctgtcctggacggactcctacactgggcagtttgcccttcagctgaagcccaggaccccttttccaccctgggccccaatgccgtcctttccccgcagagactggtcttggaaaccctcagcaaactcagcatccaggacaacaatgtggacctgattctggccacaccccccttcagccgcctggagaagttgtatagcactatggtgcgcttcctcagtgaccgaaagaacccggtgtgccgggagatggctgtggtactgctggccaacctggctcagggggacagcctggcagctcgtgccattgcagtgcagaagggcagtatcggcaacctcctgggcttcctagaggacagccttgccgccacacagttccagcagagccaggccagcctcctccacatgcagaacccaccctttgagccaactagtgtggacatgatgcggcgggctgcccgcgcgctgcttgccttggccaaggtggacgagaaccactcagagtttactctgtacgaatcacggctgttggacatctcggtatcaccgttgatgaactcattggtttcacaagtcatttgtgatgtactgtttttgattggccagtcatgacagccgtgggacacctcccccccccgtgtgtgtgtgcgtgtgtggagaacttagaaactgactgttgccctttatttatgcaaaaccacctcagaatccagtttaccctgtgctgtccagcttctcccttgggaaaaagtctctcctgtttctctctcctccttccacctcccctccctccatcacctcacgcctttctgttccttgtcctcaccttactcccctcaggaccctaccccaccctctttgaaaagacaaagctctgcctacatagaagactttttttattttaaccaaagttactgttgtttacagtgagtttggggaaaaaaaataaaataaaaatggctttcccagtccttgcatcaacgggatgccacatttcataactgtttttaatggtaaaaaaaaaaaaaaaaaatacaaaaaaaaattctgaaggacaaaaaaggtgactgctgaactgtgtgtggtttattgttgtacattcacaatcttgcaggagccaagaagttcgcagttgtgaacagaccctgttcactggagaggcctgtgcagtagagtgtagaccctttcatgtactgtactgtacacctgatactgtaaacatactgtaataataatgtctcacatggaaacagaaaacgctgggtcagcagcaagctgtagtttttaaaaatgtttttagttaaacgttgaggagaaaaaaaaaaaaggcttttcccccaaagtatcatgtgtgaacctacaacaccctgacctctttctctcctccttgattgtatgaataaccctgagatcacctcttagaactggttttaacctttagctgcagcggctacgctgccacgtgtgtatatatatgacgttgtacattgcacatacccttggatccccacagtttggtcctcctcccagctacccctttatagtatgacgagttaacaagttggtgacctgcacaaagcgagacacagctatttaatctcttgccagatatcgcccctcttggtgcgatgctgtacaggtctctgtaaaaagtccttgctgtctcagcagccaatcaacttatagtttatttttttctgggtttttgttttgttttgttttctttctaatcgaggtgtgaaaaagttctaggttcagttgaagttctgatgaagaaacacaattgagattttttcagtgataaaatctgcatatttgtatttcaacaatgtagctaaaacttgatgtaaattcctcctttttttccttttttggcttaatgaatatcatttattcagtatgaaatctttatactatatgttccacgtgttaagaataaatgtacattaaatcttggtaagacttt

SEQ ID NO: 17 - DNA, 8585 bp, Homo sapiens
cagaaagcggagagtcacagcggggccaggccctggggagcggagcctccaccgcccccctcattcccaggcaagggcttggggggaatgagccgggagagccgggtcccgagcctacagagccgggagcagctgagccgccggcgcctcggccgccgccgccgcctcctcctcctccgccgccgccagcccggagcctgagccggcggggcgggggggagaggagcgagcgcagcgcagcagcggagccccgcgaggcccgcccgggcgggtggggagggcagcccgggggactgggccccggggcggggtgggagggggggagaagacgaagacagggccgggtctctccgcggacgagacagcggggatcatggccgcgcaggtcgcccccgccgccgccagcagcctgggcaacccgccgccgccgccgccctcggagctgaagaaagccgagcagcagcagcgggaggaggcggggggcgaggcggcggcggcggcagcggccgagcgcggggaaatgaaggcagccgccgggcaggaaagcgagggccccgccgtggggccgccgcagccgctgggaaaggagctgcaggacggggccgagagcaatgggggtggcggcggcggcggagccggcagcggcggcgggcccggcgcggagccggacctgaagaactcgaacgggaacgcgggccctaggcccgccctgaacaataacctcacggagccgcccggcggcggcggtggcggcagcagcgatggggtgggggcgcctcctcactcagccgcggccgccttgccgcccccagcctacggcttcgggcaaccctacggccggagcccgtctgccgtcgccgccgccgcggccgccgtcttccaccaacaacatggcggacaacaaagccctggcctggcagcgctgcagagcggcggcggcgggggcctggagccctacgcggggccccagcagaactctcacgaccacggcttccccaaccaccagtacaactcctactaccccaaccgcagcgcctaccccccgcccgccccggcctacgcgctgagctccccgagaggtggcactccgggctccggcgcggcggcggctgccggctccaagccgcctccctcctccagcgcctccgcctcctcgtcgtcttcgtccttcgctcagcagcgcttcggggccatggggggaggcggcccctccgcggccggcgggggaactccccagcccaccgccacccccaccctcaaccaactgctcacgtcgcccagctcggcccggggctaccagggctaccccgggggcgactacagtggcgggccccaggacgggggcgccggcaagggcccggcggacatggcctcgcagtgttggggggctgcggcggcggcagctgcggcggcggccgcctcgggaggggcccaacaaaggagccaccacgcgcccatgagccccgggagcagcggcggcggggggcagccgctcgcccggacccctcagccatccagtccaatggatcagatgggcaagatgagacctcagccatatggcgggactaacccatactcgcagcaacagggacctccgtcaggaccgcagcaaggacatgggtacccagggcagccatacgggtcccagaccccgcagcggtacccgatgaccatgcagggccgggcgcagagtgccatgggcggcctctcttatacacagcagattcctccttatggacaacaaggccccagcgggtatggtcaacagggccagactccatattacaaccagcaaagtcctcaccctcagcagcagcagccaccctactcccagcaaccaccgtcccagacccctcatgcccaaccttcgtatcagcagcagccacagtctcaaccaccacagctccagtcctctcagcctccatactcccagcagccatcccagcctccacatcagcagtccccggctccatacccctcccagcagtcgacgacacagcagcacccccagagccagcccccctactcacagccacaggctcagtctccttaccagcagcagcaacctcagcagccagcaccctcgacgctctcccagcaggctgcgtatcctcagccccagtctcagcagtcccagcaaactgcctattcccagcagcgcttccctccaccgcaggagctatctcaagattcatttgggtctcaggcatcctcagccccctcaatgacctccagtaagggagggcaagaagatatgaacctgagccttcagtcaagaccctccagcttgcctgatctatctggttcaatagatgacctccccatggggacagaaggagctctgagtcctggagtgagcacatcagggatttccagcagccaaggagagcagagtaatccagctcagtctcctttctctcctcatacctcccctcacctgcctggcatccgaggcccttccccgtcccctgttggctctcccgccagtgttgctcagtctcgctcaggaccactctcgcctgctgcagtgccaggcaaccagatgccacctcggccacccagtggccagtcggacagcatcatgcatccttccatgaaccaatcaagcattgcccaagatcgaggttatatgcagaggaacccccagatgccccagtacagttccccccagcccggctcagccttatctccgcgtcagccttccggaggacagatacacacaggcatgggctcctaccagcagaactccatggggagctatggtccccaggggggtcagtatggcccacaaggtggctaccccaggcagccaaactataatgccttgcccaatgccaactaccccagtgcaggcatggctggaggcataaaccccatgggtgccggaggtcaaatgcatggacagcctggcatcccaccttatggcacactccctccagggaggatgagtcacgcctccatgggcaaccggccttatggccctaacatggccaatatgccacctcaggttgggtcagggatgtgtcccccaccagggggcatgaaccggaaaacccaagaaactgctgtcgccatgcatgttgctgccaactctatccaaaacaggccgccaggctaccccaatatgaatcaagggggcatgatgggaactggacctccttatggacaagggattaatagtatggctggcatgatcaaccctcagggacccccatattccatgggtggaaccatggccaacaattctgcagggatggcagccagcccagagatgatgggccttggggatgtaaagttaactccagccaccaaaatgaacaacaaggcagatgggacacccaagacagaatccaaatccaagaaatccagttcttctactacaaccaatgagaagatcaccaagttgtatgagctgggtggtgagcctgagaggaagatgtgggtggaccgttatctggccttcactgaggagaaggccatgggcatgacaaatctgcctgctgtgggtaggaaacctctggacctctatcgcctctatgtgtctgtgaaggagattggtggattgactcaggtcaacaagaacaaaaaatggcgggaacttgcaaccaacctcaatgtgggcacatcaagcagtgctgccagctccttgaaaaagcagtatatccagtgtctctatgcctttgaatgcaagattgaacggggagaagaccctcccccagacatctttgcagctgctgattccaagaagtcccagcccacgatccagcctccctctcctgcgggatcaggatctatgcaggggccccagactccccagtcaaccagcagttccatggcagaaggaggagacttaaagccaccaactccagcatccacaccacacagtcagatccccccattgccaggcatgagcaggagcaattcagttgggatccaggatgcctttaatgatggaagtgactccacattccagaagcggaattccatgactccaaaccctgggtatcagcccagtatgaatacctctgacatgatggggcgcatgtcctatgagccaaataaggatccttatggcagcatgaggaaagctccagggagtgatcccttcatgtcctcagggcagggccccaacggcgggatgggtgacccctacagtcgtgctgccggccctgggctaggaaatgtggcgatgggaccacgacagcactatccctatggaggtccttatgacagagtgaggacggagcctggaatagggcctgagggaaacatgagcactggggccccacagccgaatctcatgccttccaacccagactcggggatgtattctcctagccgctaccccccgcagcagcagcagcagcagcagcaacgacatgattcctatggcaatcagttctccacccaaggcaccccttctggcagccccttccccagccagcagactacaatgtatcaacagcaacagcagaattacaagcggccaatggatggcacatatggccctcctgccaagcggcacgaaggggagatgtacagcgtgccatacagcactgggcaggggcagcctcagcagcagcagttgcccccagcccagccccagcctgccagccagcaacaagctgcccagccttcccctcagcaagatgtatacaaccagtatggcaatgcctatcctgccactgccacagctgctactgagcgccgaccagcaggcggcccccagaaccaatttccattccagtttggccgagaccgtgtctctgcaccccctggcaccaatgcccagcaaaacatgccaccacaaatgatgggcggccccatacaggcatcagctgaggttgctcagcaaggcaccatgtggcaggggcgtaatgacatgacctataattatgccaacaggcagagcacgggctctgccccccagggccccgcctatcatggcgtgaaccgaacagatgaaatgctgcacacagatcagagggccaaccacgaaggctcgtggccttcccatggcacacgccagcccccatatggtccctctgcccctgtgccccccatgacaaggccccctccatctaactaccagcccccaccaagcatgcagaatcacattcctcaggtatccagccctgctcccctgccccggccaatggagaaccgcacctctcctagcaagtctccattcctgcactctgggatgaaaatgcagaaggcaggtcccccagtacctgcctcgcacatagcacctgcccctgtgcagccccccatgattcggcgggatatcaccttcccacctggctctgttgaagccacacagcctgtgttgaagcagaggaggcggctcacaatgaaagacattggaaccccggaggcatggcgggtaatgatgtccctcaagtctggtctcctggcagagagcacatgggcattagataccatcaacatcctgctgtatgatgacaacagcatcatgaccttcaacctcagtcagctcccagggttgctagagctccttgtagaatatttccgacgatgcctgattgagatctttggcattttaaaggagtatgaggtgggtgacccaggacagagaacgctactggatcctgggaggttcagcaaggtgtctagtccagctcccatggagggtggggaagaagaagaagaacttctaggtcctaaactagaagaggaagaagaagaggaagtagttgaaaatgatgaggagatagccttttcaggcaaggacaagccagcttcagagaatagtgaggagaagctgatcagtaagtttgacaagcttccagtaaagatcgtacagaagaatgatccatttgtggtggactgctcagataagcttgggcgtgtgcaggagtttgacagtggcctgctgcactggcggattggtgggggggacaccactgagcatatccagacccacttcgagagcaagacagagctgctgccttcccggcctcacgcaccctgcccaccagcccctcggaagcatgtgacaacagcagagggtacaccagggacaacagaccaggaggggcccccacctgatggacctccagaaaaacggatcacagccactatggatgacatgttgtctactcggtctagcaccttgaccgaggatggagctaagagttcagaggccatcaaggagagcagcaagtttccatttggcattagcccagcacagagccaccggaacatcaagatcctagaggacgaaccccacagtaaggatgagaccccactgtgtacccttctggactggcaggattctcttgccaagcgctgcgtctgtgtgtccaataccattcgaagcctgtcatttgtgccaggcaatgactttgagatgtccaaacacccagggctgctgctcatcctgggcaagctgatcctgctgcaccacaagcacccagaacggaagcaggcaccactaacttatgaaaaggaggaggaacaggaccaaggggtgagctgcaacaaagtggagtggtggtgggactgcttggagatgctccgggaaaacaccttggttacactcgccaacatctcggggcagttggacctatctccataccccgagagcatttgcctgcctgtcctggacggactcctacactgggcagtttgcccttcagctgaagcccaggaccccttttccaccctgggccccaatgccgtcctttccccgcagagactggtcttggaaaccctcagcaaactcagcatccaggacaacaatgtggacctgattctggccacaccccccttcagccgcctggagaagttgtatagcactatggtgcgcttcctcagtgaccgaaagaacccggtgtgccgggagatggctgtggtactgctggccaacctggctcagggggacagcctggcagctcgtgccattgcagtgcagaagggcagtatcggcaacctcctgggcttcctagaggacagccttgccgccacacagttccagcagagccaggccagcctcctccacatgcagaacccaccctttgagccaactagtgtggacatgatgcggcgggctgcccgcgcgctgcttgccttggccaaggtggacgagaaccactcagagtttactctgtacgaatcacggctgttggacatctcggtatcaccgttgatgaactcattggtttcacaagtcatttgtgatgtactgtttttgattggccagtcatgacagccgtgggacacctcccccccccgtgtgtgtgtgcgtgtgtggagaacttagaaactgactgttgccctttatttatgcaaaaccacctcagaatccagtttaccctgtgctgtccagcttctcccttgggaaaaagtctctcctgtttctctctcctccttccacctcccctccctccatcacctcacgcctttctgttccttgtcctcaccttactcccctcaggaccctaccccaccctctttgaaaagacaaagctctgcctacatagaagactttttttattttaaccaaagttactgttgtttacagtgagtttggggaaaaaaaataaaataaaaatggctttcccagtccttgcatcaacgggatgccacatttcataactgtttttaatggtaaaaaaaaaaaaaaaaaatacaaaaaaaaattctgaaggacaaaaaaggtgactgctgaactgtgtgtggtttattgttgtacattcacaatcttgcaggagccaagaagttcgcagttgtgaacagaccctgttcactggagaggcctgtgcagtagagtgtagaccctttcatgtactgtactgtacacctgatactgtaaacatactgtaataataatgtctcacatggaaacagaaaacgctgggtcagcagcaagctgtagtttttaaaaatgtttttagttaaacgttgaggagaaaaaaaaaaaaggcttttcccccaaagtatcatgtgtgaacctacaacaccctgacctctttctctcctccttgattgtatgaataaccctgagatcacctcttagaactggttttaacctttagctgcagcggctacgctgccacgtgtgtatatatatgacgttgtacattgcacatacccttggatccccacagtttggtcctcctcccagctacccctttatagtatgacgagttaacaagttggtgacctgcacaaagcgagacacagctatttaatctcttgccagatatcgcccctcttggtgcgatgctgtacaggtctctgtaaaaagtccttgctgtctcagcagccaatcaacttatagtttatttttttctgggtttttgttttgttttgttttctttctaatcgaggtgtgaaaaagttctaggttcagttgaagttctgatgaagaaacacaattgagattttttcagtgataaaatctgcatatttgtatttcaacaatgtagctaaaacttgatgtaaattcctcctttttttccttttttggcttaatgaatatcatttattcagtatgaaatctttatactatatgttccacgtgttaagaataaatgtacattaaatcttggtaagacttt

SEQ ID NO: 18 - DNA, 8585 bp, Homo sapiens
cagaaagcggagagtcacagcggggccaggccctggggagcggagcctccaccgcccccctcattcccaggcaagggcttggggggaatgagccgggagagccgggtcccgagcctacagagccgggagcagctgagccgccggcgcctcggccgccgccgccgcctcctcctcctccgccgccgccagcccggagcctgagccggcggggcgggggggagaggagcgagcgcagcgcagcagcggagccccgcgaggcccgcccgggcgggtggggagggcagcccgggggactgggccccggggcggggtgggagggggggagaagacgaagacagggccgggtctctccgcggacgagacagcggggatcatggccgcgcaggtcgcccccgccgccgccagcagcctgggcaacccgccgccgccgccgccctcggagctgaagaaagccgagcagcagcagcgggaggaggcggggggcgaggcggcggcggcggcagcggccgagcgcggggaaatgaaggcagccgccgggcaggaaagcgagggccccgccgtggggccgccgcagccgctgggaaaggagctgcaggacggggccgagagcaatgggggtggcggcggcggcggagccggcagcggcggcgggcccggcgcggagccggacctgaagaactcgaacgggaacgcgggccctaggcccgccctgaacaataacctcacggagccgcccggcggcggcggtggcggcagcagcgatggggtgggggcgcctcctcactcagccgcggccgccttgccgcccccagcctacggcttcgggcaaccctacggccggagcccgtctgccgtcgccgccgccgcggccgccgtcttccaccaacaacatggcggacaacaaagccctggcctggcagcgctgcagagcggcggcggcgggggcctggagccctacgcggggccccagcagaactctcacgaccacggcttccccaaccaccagtacaactcctactaccccaaccgcagcgcctaccccccgcccgccccggcctacgcgctgagctccccgagaggtggcactccgggctccggcgcggcggcggctgccggctccaagccgcctccctcctccagcgcctccgcctcctcgtcgtcttcgtccttcgctcagcagcgcttcggggccatggggggaggcggcccctccgcggccggcgggggaactccccagcccaccgccacccccaccctcaaccaactgctcacgtcgcccagctcggcccggggctaccagggctaccccgggggcgactacagtggcgggccccaggacgggggcgccggcaagggcccggcggacatggcctcgcagtgttggggggctgcggcggcggcagctgcggcggcggccgcctcgggaggggcccaacaaaggagccaccacgcgcccatgagccccgggagcagcggcggcggggggcagccgctcgcccggacccctcagccatccagtccaatggatcagatgggcaagatgagacctcagccatatggcgggactaacccatactcgcagcaacagggacctccgtcaggaccgcagcaaggacatgggtacccagggcagccatacgggtcccagaccccgcagcggtacccgatgaccatgcagggccgggcgcagagtgccatgggcggcctctcttatacacagcagattcctccttatggacaacaaggccccagcgggtatggtcaacagggccagactccatattacaaccagcaaagtcctcaccctcagcagcagcagccaccctactcccagcaaccaccgtcccagacccctcatgcccaaccttcgtatcagcagcagccacagtctcaaccaccacagctccagtcctctcagcctccatactcccagcagccatcccagcctccacatcagcagtccccggctccatacccctcccagcagtcgacgacacagcagcacccccagagccagcccccctactcacagccacaggctcagtctccttaccagcagcagcaacctcagcagccagcaccctcgacgctctcccagcaggctgcgtatcctcagccccagtctcagcagtcccagcaaactgcctattcccagcagcgcttccctccaccgcaggagctatctcaagattcatttgggtctcaggcatcctcagccccctcaatgacctccagtaagggagggcaagaagatatgaacctgagccttcagtcaagaccctccagcttgcctgatctatctggttcaatagatgacctccccatggggacagaaggagctctgagtcctggagtgagcacatcagggatttccagcagccaaggagagcagagtaatccagctcagtctcctttctctcctcatacctcccctcacctgcctggcatccgaggcccttccccgtcccctgttggctctcccgccagtgttgctcagtctcgctcaggaccactctcgcctgctgcagtgccaggcaaccagatgccacctcggccacccagtggccagtcggacagcatcatgcatccttccatgaaccaatcaagcattgcccaagatcgaggttatatgcagaggaacccccagatgccccagtacagttccccccagcccggctcagccttatctccgcgtcagccttccggaggacagatacacacaggcatgggctcctaccagcagaactccatggggagctatggtccccaggggggtcagtatggcccacaaggtggctaccccaggcagccaaactataatgccttgcccaatgccaactaccccagtgcaggcatggctggaggcataaaccccatgggtgccggaggtcaaatgcatggacagcctggcatcccaccttatggcacactccctccagggaggatgagtcacgcctccatgggcaaccggccttatggccctaacatggccaatatgccacctcaggttgggtcagggatgtgtcccccaccagggggcatgaaccggaaaacccaagaaactgctgtcgccatgcatgttgctgccaactctatccaaaacaggccgccaggctaccccaatatgaatcaagggggcatgatgggaactggacctccttatggacaagggattaatagtatggctggcatgatcaaccctcagggacccccatattccatgggtggaaccatggccaacaattctgcagggatggcagccagcccagagatgatgggccttggggatgtaaagttaactccagccaccaaaatgaacaacaaggcagatgggacacccaagacagaatccaaatccaagaaatccagttcttctactacaaccaatgagaagatcaccaagttgtatgagctgggtggtgagcctgagaggaagatgtgggtggaccgttatctggccttcactgaggagaaggccatgggcatgacaaatctgcctgctgtgggtaggaaacctctggacctctatcgcctctatgtgtctgtgaaggagattggtggattgactcaggtcaacaagaacaaaaaatggcgggaacttgcaaccaacctcaatgtgggcacatcaagcagtgctgccagctccttgaaaaagcagtatatccagtgtctctatgcctttgaatgcaagattgaacggggagaagaccctcccccagacatctttgcagctgctgattccaagaagtcccagcccaagatccagcctccctctcctgcgggatcaggatctatgcaggggccccagactccccagtcaaccagcagttccatggcagaaggaggagacttaaagccaccaactccagcatccacaccacacagtcagatccccccattgccaggcatgagcaggagcaattcagttgggatccaggatgcctttaatgatggaagtgactccacattccagaagcggaattccatgactccaaaccctgggtatcagcccagtatgaatacctctgacatgatggggcgcatgtcctatgagccaaataaggatccttatggcagcatgaggaaagctccagggagtgatcccttcatgtcctcagggcagggccccaacggcgggatgggtgacccctacagtcgtgctgccggccctgggctaggaaatgtggcgatgggaccacgacagcactatccctatggaggtccttatgacagagtgaggacggagcctggaatagggcctgagggaaacatgagcactggggccccacagccgaatctcatgccttccaacccagactcggggatgtattctcctagccgctaccccccgcagcagcagcagcagcagcagcaacgacatgattcctatggcaatcagttctccacccaaggcaccccttctggcagccccttccccagccagcagactacaatgtatcaacagcaacagcagaattacaagcggccaatggatggcacatatggccctcctgccaagcggcacgaaggggagatgtacagcgtgccatacagcactgggcaggggcagcctcagcagcagcagttgcccccagcccagccccagcctgccagccagcaacaagctgcccagccttcccctcagcaagatgtatacaaccagtatggcaatgcctatcctgccactgccacagctgctactgagcgccgaccagcaggcggcccccagaaccaatttccattccagtttggccgagaccgtgtctctgcaccccctggcaccaatgcccagcaaaacatgccaccacaaatgatgggcggccccatacaggcatcagctgaggttgctcagcaaggcaccatgtggcaggggcgtaatgacatgacctataattatgccaacaggcagagcacgggctctgccccccagggccccgcctatcatggcgtgaaccgaacagatgaaatgctgcacacagatcagagggccaaccacgaaggctcgtggccttcccatggcacacgccagcccccatatggtccctctgcccctgtgccccccatgacaaggccccctccatctaactaccagcccccaccaagcatgcagaatcacattcctcaggtatccagccctgctcccctgccccggccaatggagaaccgcacctctcctagcaagtctccattcctgcactctgggatgaaaatgcagaaggcaggtcccccagtacctgcctcgcacatagcacctgcccctgtgcagccccccatgattcggcgggatatcaccttcccacctggctctgttgaagccacacagcctgtgttgaagcagaggaggcggctcacaatgaaagacattggaaccccggaggcatggcgggtaatgatgtccctcaagtctggtctcctggcagagagcacatgggcattagataccatcaacatcctgctgtatgatgacaacagcatcatgaccttcaacctcagtcagctcccagggttgctagagctccttgtagaatatttccgatgatgcctgattgagatctttggcattttaaaggagtatgaggtgggtgacccaggacagagaacgctactggatcctgggaggttcagcaaggtgtctagtccagctcccatggagggtggggaagaagaagaagaacttctaggtcctaaactagaagaggaagaagaagaggaagtagttgaaaatgatgaggagatagccttttcaggcaaggacaagccagcttcagagaatagtgaggagaagctgatcagtaagtttgacaagcttccagtaaagatcgtacagaagaatgatccatttgtggtggactgctcagataagcttgggcgtgtgcaggagtttgacagtggcctgctgcactggcggattggtgggggggacaccactgagcatatccagacccacttcgagagcaagacagagctgctgccttcccggcctcacgcaccctgcccaccagcccctcggaagcatgtgacaacagcagagggtacaccagggacaacagaccaggaggggcccccacctgatggacctccagaaaaacggatcacagccactatggatgacatgttgtctactcggtctagcaccttgaccgaggatggagctaagagttcagaggccatcaaggagagcagcaagtttccatttggcattagcccagcacagagccaccggaacatcaagatcctagaggacgaaccccacagtaaggatgagaccccactgtgtacccttctggactggcaggattctcttgccaagcgctgcgtctgtgtgtccaataccattcgaagcctgtcatttgtgccaggcaatgactttgagatgtccaaacacccagggctgctgctcatcctgggcaagctgatcctgctgcaccacaagcacccagaacggaagcaggcaccactaacttatgaaaaggaggaggaacaggaccaaggggtgagctgcaacaaagtggagtggtggtgggactgcttggagatgctccgggaaaacaccttggttacactcgccaacatctcggggcagttggacctatctccataccccgagagcatttgcctgcctgtcctggacggactcctacactgggcagtttgcccttcagctgaagcccaggaccccttttccaccctgggccccaatgccgtcctttccccgcagagactggtcttggaaaccctcagcaaactcagcatccaggacaacaatgtggacctgattctggccacaccccccttcagccgcctggagaagttgtatagcactatggtgcgcttcctcagtgaccgaaagaacccggtgtgccgggagatggctgtggtactgctggccaacctggctcagggggacagcctggcagctcgtgccattgcagtgcagaagggcagtatcggcaacctcctgggcttcctagaggacagccttgccgccacacagttccagcagagccaggccagcctcctccacatgcagaacccaccctttgagccaactagtgtggacatgatgcggcgggctgcccgcgcgctgcttgccttggccaaggtggacgagaaccactcagagtttactctgtacgaatcacggctgttggacatctcggtatcaccgttgatgaactcattggtttcacaagtcatttgtgatgtactgtttttgattggccagtcatgacagccgtgggacacctcccccccccgtgtgtgtgtgcgtgtgtggagaacttagaaactgactgttgccctttatttatgcaaaaccacctcagaatccagtttaccctgtgctgtccagcttctcccttgggaaaaagtctctcctgtttctctctcctccttccacctcccctccctccatcacctcacgcctttctgttccttgtcctcaccttactcccctcaggaccctaccccaccctctttgaaaagacaaagctctgcctacatagaagactttttttattttaaccaaagttactgttgtttacagtgagtttggggaaaaaaaataaaataaaaatggctttcccagtccttgcatcaacgggatgccacatttcataactgtttttaatggtaaaaaaaaaaaaaaaaaatacaaaaaaaaattctgaaggacaaaaaaggtgactgctgaactgtgtgtggtttattgttgtacattcacaatcttgcaggagccaagaagttcgcagttgtgaacagaccctgttcactggagaggcctgtgcagtagagtgtagaccctttcatgtactgtactgtacacctgatactgtaaacatactgtaataataatgtctcacatggaaacagaaaacgctgggtcagcagcaagctgtagtttttaaaaatgtttttagttaaacgttgaggagaaaaaaaaaaaaggcttttcccccaaagtatcatgtgtgaacctacaacaccctgacctctttctctcctccttgattgtatgaataaccctgagatcacctcttagaactggttttaacctttagctgcagcggctacgctgccacgtgtgtatatatatgacgttgtacattgcacatacccttggatccccacagtttggtcctcctcccagctacccctttatagtatgacgagttaacaagttggtgacctgcacaaagcgagacacagctatttaatctcttgccagatatcgcccctcttggtgcgatgctgtacaggtctctgtaaaaagtccttgctgtctcagcagccaatcaacttatagtttatttttttctgggtttttgttttgttttgttttctttctaatcgaggtgtgaaaaagttctaggttcagttgaagttctgatgaagaaacacaattgagattttttcagtgataaaatctgcatatttgtatttcaacaatgtagctaaaacttgatgtaaattcctcctttttttccttttttggcttaatgaatatcatttattcagtatgaaatctttatactatatgttccacgtgttaagaataaatgtacattaaatcttggtaagacttt

SEQ ID NO: 19 - DNA, 8584 bp, Homo sapiens
cagaaagcggagagtcacagcggggccaggccctggggagcggagcctccaccgcccccctcattcccaggcaagggcttggggggaatgagccgggagagccgggtcccgagcctacagagccgggagcagctgagccgccggcgcctcggccgccgccgccgcctcctcctcctccgccgccgccagcccggagcctgagccggcggggcgggggggagaggagcgagcgcagcgcagcagcggagccccgcgaggcccgcccgggcgggtggggagggcagcccgggggactgggccccggggcggggtgggagggggggagaagacgaagacagggccgggtctctccgcggacgagacagcggggatcatggccgcgcaggtcgcccccgccgccgccagcagcctgggcaacccgccgccgccgccgccctcggagctgaagaaagccgagcagcagcagcgggaggaggcggggggcgaggcggcggcggcggcagcggccgagcgcggggaaatgaaggcagccgccgggcaggaaagcgagggccccgccgtggggccgccgcagccgctgggaaaggagctgcaggacggggccgagagcaatgggggtggcggcggcggcggagccggcagcggcggcgggcccggcgcggagccggacctgaagaactcgaacgggaacgcgggccctaggcccgccctgaacaataacctcacggagccgcccggcggcggcggtggcggcagcagcgatggggtgggggcgcctcctcactcagccgcggccgccttgccgcccccagcctacggcttcgggcaaccctacggccggagcccgtctgccgtcgccgccgccgcggccgccgtcttccaccaacaacatggcggacaacaaagccctggcctggcagcgctgcagagcggcggcggcgggggcctggagccctacgcggggccccagcagaactctcacgaccacggcttccccaaccaccagtacaactcctactaccccaaccgcagcgcctaccccccgcccgccccggcctacgcgctgagctccccgagaggtggcactccgggctccggcgcggcggcggctgccggctccaagccgcctccctcctccagcgcctccgcctcctcgtcgtcttcgtccttcgctcagcagcgcttcggggccatggggggaggcggcccctccgcggccggcgggggaactccccagcccaccgccacccccaccctcaaccaactgctcacgtcgcccagctcggcccggggctaccagggctaccccgggggcgactacagtggcgggccccaggacgggggcgccggcaagggcccggcggacatggcctcgcagtgttggggggctgcggcggcggcagctgcggcggcggccgcctcgggaggggcccaacaaaggagccaccacgcgcccatgagccccgggagcagcggcggcggggggcagccgctcgcccggacccctcagccatccagtccaatggatcagatgggcaagatgagacctcagccatatggcgggactaacccatactcgcagcaacagggacctccgtcaggaccgcagcaaggacatgggtacccagggcagccatacgggtcccagaccccgcagcggtacccgatgaccatgcagggccgggcgcagagtgccatgggcggcctctcttatacacagcagattcctccttatggacaacaaggccccagcgggtatggtcaacagggccagactccatattacaaccagcaaagtcctcaccctcagcagcagcagccaccctactcccagcaaccaccgtcccagacccctcatgcccaaccttcgtatcagcagcagccacagtctcaaccaccacagctccagtcctctcagcctccatactcccagcagccatcccagcctccacatcagcagtccccggctccatacccctcccagcagtcgacgacacagcagcacccccagagccagcccccctactcacagccacaggctcagtctccttaccagcagcagcaacctcagcagccagcaccctcgacgctctcccagcaggctgcgtatcctcagccccagtctcagcagtcccagcaaactgcctattcccagcagcgcttccctccaccgcaggagctatctcaagattcatttgggtctcaggcatcctcagccccctcaatgacctccagtaagggagggcaagaagatatgaacctgagccttcagtcaagaccctccagcttgcctgatctatctggttcaatagatgacctccccatggggacagaaggagctctgagtcctggagtgagcacatcagggatttccagcagccaaggagagcagagtaatccagctcagtctcctttctctcctcatacctcccctcacctgcctggcatccgaggcccttccccgtcccctgttggctctcccgccagtgttgctcagtctcgctcaggaccactctcgcctgctgcagtgccaggcaaccagatgccacctcggccacccagtggccagtcggacagcatcatgcatccttccatgaaccaatcaagcattgcccaagatcgaggttatatgcagaggaacccccagatgccccagtacagttccccccagcccggctcagccttatctccgcgtcagccttccggaggacagatacacacaggcatgggctcctaccagcagaactccatggggagctatggtccccaggggggtcagtatggcccacaaggtggctaccccaggcagccaaactataatgccttgcccaatgccaactaccccagtgcaggcatggctggaggcataaaccccatgggtgccggaggtcaaatgcatggacagcctggcatcccaccttatggcacactccctccagggaggatgagtcacgcctccatgggcaaccggccttatggccctaacatggccaatatgccacctcaggttgggtcagggatgtgtcccccaccagggggcatgaaccggaaaacccaagaaactgctgtcgccatgcatgttgctgccaactctatccaaaacaggccgccaggctaccccaatatgaatcaagggggcatgatgggaactggacctccttatggacaagggattaatagtatggctggcatgatcaaccctcagggacccccatattccatgggtggaaccatggccaacaattctgcagggatggcagccagcccagagatgatgggccttggggatgtaaagttaactccagccaccaaaatgaacaacaaggcagatgggacacccaagacagaatccaaatccaagaaatccagttcttctactacaaccaatgagaagatcaccaagttgtatgagctgggtggtgagcctgagaggaagatgtgggtggaccgttatctggccttcactgaggagaaggccatgggcatgacaaatctgcctgctgtgggtaggaaacctctggacctctatcgcctctatgtgtctgtgaaggagattggtggattgactcaggtcaacaagaacaaaaaatggcgggaacttgcaaccaacctcaatgtgggcacatcaagcagtgctgccagctccttgaaaaagcagtatatccagtgtctctatgcctttgaatgcaagattgaacggggagaagaccctcccccagacatctttgcagctgctgattccaagaagtcccagcccaagatccagcctccctctcctgcgggatcaggatctatgcaggggccccagactccccagtcaaccagcagttccatggcagaaggaggagacttaaagccaccaactccagcatccacaccacacagtcagatccccccattgccaggcatgagcaggagcaattcagttgggatccaggatgcctttaatgatggaagtgactccacattccagaagcggaattccatgactccaaaccctgggtatcagcccagtatgaatacctctgacatgatggggcgcatgtcctatgagccaaataaggatccttatggcagcatgaggaaagctccagggagtgatcccttcatgtcctcagggcagggccccaacggcgggatgggtgacccctacagtcgtgctgccggccctgggctaggaaatgtggcgatgggaccacgacagcactatccctatggaggtccttatgacagagtgaggacggagcctggaatagggcctgagggaaacatgagcactggggccccacagccgaatctcatgccttccaacccagactcgggatgtattctcctagccgctaccccccgcagcagcagcagcagcagcagcaacgacatgattcctatggcaatcagttctccacccaaggcaccccttctggcagccccttccccagccagcagactacaatgtatcaacagcaacagcagaattacaagcggccaatggatggcacatatggccctcctgccaagcggcacgaaggggagatgtacagcgtgccatacagcactgggcaggggcagcctcagcagcagcagttgcccccagcccagccccagcctgccagccagcaacaagctgcccagccttcccctcagcaagatgtatacaaccagtatggcaatgcctatcctgccactgccacagctgctactgagcgccgaccagcaggcggcccccagaaccaatttccattccagtttggccgagaccgtgtctctgcaccccctggcaccaatgcccagcaaaacatgccaccacaaatgatgggcggccccatacaggcatcagctgaggttgctcagcaaggcaccatgtggcaggggcgtaatgacatgacctataattatgccaacaggcagagcacgggctctgccccccagggccccgcctatcatggcgtgaaccgaacagatgaaatgctgcacacagatcagagggccaaccacgaaggctcgtggccttcccatggcacacgccagcccccatatggtccctctgcccctgtgccccccatgacaaggccccctccatctaactaccagcccccaccaagcatgcagaatcacattcctcaggtatccagccctgctcccctgccccggccaatggagaaccgcacctctcctagcaagtctccattcctgcactctgggatgaaaatgcagaaggcaggtcccccagtacctgcctcgcacatagcacctgcccctgtgcagccccccatgattcggcgggatatcaccttcccacctggctctgttgaagccacacagcctgtgttgaagcagaggaggcggctcacaatgaaagacattggaaccccggaggcatggcgggtaatgatgtccctcaagtctggtctcctggcagagagcacatgggcattagataccatcaacatcctgctgtatgatgacaacagcatcatgaccttcaacctcagtcagctcccagggttgctagagctccttgtagaatatttccgacgatgcctgattgagatctttggcattttaaaggagtatgaggtgggtgacccaggacagagaacgctactggatcctgggaggttcagcaaggtgtctagtccagctcccatggagggtggggaagaagaagaagaacttctaggtcctaaactagaagaggaagaagaagaggaagtagttgaaaatgatgaggagatagccttttcaggcaaggacaagccagcttcagagaatagtgaggagaagctgatcagtaagtttgacaagcttccagtaaagatcgtacagaagaatgatccatttgtggtggactgctcagataagcttgggcgtgtgcaggagtttgacagtggcctgctgcactggcggattggtgggggggacaccactgagcatatccagacccacttcgagagcaagacagagctgctgccttcccggcctcacgcaccctgcccaccagcccctcggaagcatgtgacaacagcagagggtacaccagggacaacagaccaggaggggcccccacctgatggacctccagaaaaacggatcacagccactatggatgacatgttgtctactcggtctagcaccttgaccgaggatggagctaagagttcagaggccatcaaggagagcagcaagtttccatttggcattagcccagcacagagccaccggaacatcaagatcctagaggacgaaccccacagtaaggatgagaccccactgtgtacccttctggactggcaggattctcttgccaagcgctgcgtctgtgtgtccaataccattcgaagcctgtcatttgtgccaggcaatgactttgagatgtccaaacacccagggctgctgctcatcctgggcaagctgatcctgctgcaccacaagcacccagaacggaagcaggcaccactaacttatgaaaaggaggaggaacaggaccaaggggtgagctgcaacaaagtggagtggtggtgggactgcttggagatgctccgggaaaacaccttggttacactcgccaacatctcggggcagttggacctatctccataccccgagagcatttgcctgcctgtcctggacggactcctacactgggcagtttgcccttcagctgaagcccaggaccccttttccaccctgggccccaatgccgtcctttccccgcagagactggtcttggaaaccctcagcaaactcagcatccaggacaacaatgtggacctgattctggccacaccccccttcagccgcctggagaagttgtatagcactatggtgcgcttcctcagtgaccgaaagaacccggtgtgccgggagatggctgtggtactgctggccaacctggctcagggggacagcctggcagctcgtgccattgcagtgcagaagggcagtatcggcaacctcctgggcttcctagaggacagccttgccgccacacagttccagcagagccaggccagcctcctccacatgcagaacccaccctttgagccaactagtgtggacatgatgcggcgggctgcccgcgcgctgcttgccttggccaaggtggacgagaaccactcagagtttactctgtacgaatcacggctgttggacatctcggtatcaccgttgatgaactcattggtttcacaagtcatttgtgatgtactgtttttgattggccagtcatgacagccgtgggacacctcccccccccgtgtgtgtgtgcgtgtgtggagaacttagaaactgactgttgccctttatttatgcaaaaccacctcagaatccagtttaccctgtgctgtccagcttctcccttgggaaaaagtctctcctgtttctctctcctccttccacctcccctccctccatcacctcacgcctttctgttccttgtcctcaccttactcccctcaggaccctaccccaccctctttgaaaagacaaagctctgcctacatagaagactttttttattttaaccaaagttactgttgtttacagtgagtttggggaaaaaaaataaaataaaaatggctttcccagtccttgcatcaacgggatgccacatttcataactgtttttaatggtaaaaaaaaaaaaaaaaaatacaaaaaaaaattctgaaggacaaaaaaggtgactgctgaactgtgtgtggtttattgttgtacattcacaatcttgcaggagccaagaagttcgcagttgtgaacagaccctgttcactggagaggcctgtgcagtagagtgtagaccctttcatgtactgtactgtacacctgatactgtaaacatactgtaataataatgtctcacatggaaacagaaaacgctgggtcagcagcaagctgtagtttttaaaaatgtttttagttaaacgttgaggagaaaaaaaaaaaaggcttttcccccaaagtatcatgtgtgaacctacaacaccctgacctctttctctcctccttgattgtatgaataaccctgagatcacctcttagaactggttttaacctttagctgcagcggctacgctgccacgtgtgtatatatatgacgttgtacattgcacatacccttggatccccacagtttggtcctcctcccagctacccctttatagtatgacgagttaacaagttggtgacctgcacaaagcgagacacagctatttaatctcttgccagatatcgcccctcttggtgcgatgctgtacaggtctctgtaaaaagtccttgctgtctcagcagccaatcaacttatagtttatttttttctgggtttttgttttgttttgttttctttctaatcgaggtgtgaaaaagttctaggttcagttgaagttctgatgaagaaacacaattgagattttttcagtgataaaatctgcatatttgtatttcaacaatgtagctaaaacttgatgtaaattcctcctttttttccttttttggcttaatgaatatcatttattcagtatgaaatctttatactatatgttccacgtgttaagaataaatgtacattaaatcttggtaagacttt

SEQ ID NO: 20 - DNA, 8585 bp, Homo sapiens
cagaaagcggagagtcacagcggggccaggccctggggagcggagcctccaccgcccccctcattcccaggcaagggcttggggggaatgagccgggagagccgggtcccgagcctacagagccgggagcagctgagccgccggcgcctcggccgccgccgccgcctcctcctcctccgccgccgccagcccggagcctgagccggcggggcgggggggagaggagcgagcgcagcgcagcagcggagccccgcgaggcccgcccgggcgggtggggagggcagcccgggggactgggccccggggcggggtgggagggggggagaagacgaagacagggccgggtctctccgcggacgagacagcggggatcatggccgcgcaggtcgcccccgccgccgccagcagcctgggcaacccgccgccgccgccgccctcggagctgaagaaagccgagcagcagcagcgggaggaggcggggggcgaggcggcggcggcggcagcggccgagcgcggggaaatgaaggcagccgccgggcaggaaagcgagggccccgccgtggggccgccgcagccgctgggaaaggagctgcaggacggggccgagagcaatgggggtggcggcggcggcggagccggcagcggcggcgggcccggcgcggagccggacctgaagaactcgaacgggaacgcgggccctaggcccgccctgaacaataacctcacggagccgcccggcggcggcggtggcggcagcagcgatggggtgggggcgcctcctcactcagccgcggccgccttgccgcccccagcctacggcttcgggcaaccctacggccggagcccgtctgccgtcgccgccgccgcggccgccgtcttccaccaacaacatggcggacaacaaagccctggcctggcagcgctgcagagcggcggcggcgggggcctggagccctacgcggggccccagcagaactctcacgaccacggcttccccaaccaccagtacaactcctactaccccaaccgcagcgcctaccccccgcccgccccggcctacgcgctgagctccccgagaggtggcactccgggctccggcgcggcggcggctgccggctccaagccgcctccctcctccagcgcctccgcctcctcgtcgtcttcgtccttcgctcagcagcgcttcggggccatggggggaggcggcccctccgcggccggcgggggaactccccagcccaccgccacccccaccctcaaccaactgctcacgtcgcccagctcggcccggggctaccagggctaccccgggggcgactacagtggcgggccccaggacgggggcgccggcaagggcccggcggacatggcctcgcagtgttggggggctgcggcggcggcagctgcggcggcggccgcctcgggaggggcccaacaaaggagccaccacgcgcccatgagccccgggagcagcggcggcggggggcagccgctcgcccggacccctcagccatccagtccaatggatcagatgggcaagatgagacctcagccatatggcgggactaacccatactcgcagcaacagggacctccgtcaggaccgcagcaaggacatgggtacccagggcagccatacgggtcccagaccccgcagcggtacccgatgaccatgcagggccgggcgcagagtgccatgggcggcctctcttatacacagcagattcctccttatggacaacaaggccccagcgggtatggtcaacagggccagactccatattacaaccagcaaagtcctcaccctcagcagtagcagccaccctactcccagcaaccaccgtcccagacccctcatgcccaaccttcgtatcagcagcagccacagtctcaaccaccacagctccagtcctctcagcctccatactcccagcagccatcccagcctccacatcagcagtccccggctccatacccctcccagcagtcgacgacacagcagcacccccagagccagcccccctactcacagccacaggctcagtctccttaccagcagcagcaacctcagcagccagcaccctcgacgctctcccagcaggctgcgtatcctcagccccagtctcagcagtcccagcaaactgcctattcccagcagcgcttccctccaccgcaggagctatctcaagattcatttgggtctcaggcatcctcagccccctcaatgacctccagtaagggagggcaagaagatatgaacctgagccttcagtcaagaccctccagcttgcctgatctatctggttcaatagatgacctccccatggggacagaaggagctctgagtcctggagtgagcacatcagggatttccagcagccaaggagagcagagtaatccagctcagtctcctttctctcctcatacctcccctcacctgcctggcatccgaggcccttccccgtcccctgttggctctcccgccagtgttgctcagtctcgctcaggaccactctcgcctgctgcagtgccaggcaaccagatgccacctcggccacccagtggccagtcggacagcatcatgcatccttccatgaaccaatcaagcattgcccaagatcgaggttatatgcagaggaacccccagatgccccagtacagttccccccagcccggctcagccttatctccgcgtcagccttccggaggacagatacacacaggcatgggctcctaccagcagaactccatggggagctatggtccccaggggggtcagtatggcccacaaggtggctaccccaggcagccaaactataatgccttgcccaatgccaactaccccagtgcaggcatggctggaggcataaaccccatgggtgccggaggtcaaatgcatggacagcctggcatcccaccttatggcacactccctccagggaggatgagtcacgcctccatgggcaaccggccttatggccctaacatggccaatatgccacctcaggttgggtcagggatgtgtcccccaccagggggcatgaaccggaaaacccaagaaactgctgtcgccatgcatgttgctgccaactctatccaaaacaggccgccaggctaccccaatatgaatcaagggggcatgatgggaactggacctccttatggacaagggattaatagtatggctggcatgatcaaccctcagggacccccatattccatgggtggaaccatggccaacaattctgcagggatggcagccagcccagagatgatgggccttggggatgtaaagttaactccagccaccaaaatgaacaacaaggcagatgggacacccaagacagaatccaaatccaagaaatccagttcttctactacaaccaatgagaagatcaccaagttgtatgagctgggtggtgagcctgagaggaagatgtgggtggaccgttatctggccttcactgaggagaaggccatgggcatgacaaatctgcctgctgtgggtaggaaacctctggacctctatcgcctctatgtgtctgtgaaggagattggtggattgactcaggtcaacaagaacaaaaaatggcgggaacttgcaaccaacctcaatgtgggcacatcaagcagtgctgccagctccttgaaaaagcagtatatccagtgtctctatgcctttgaatgcaagattgaacggggagaagaccctcccccagacatctttgcagctgctgattccaagaagtcccagcccaagatccagcctccctctcctgcgggatcaggatctatgcaggggccccagactccccagtcaaccagcagttccatggcagaaggaggagacttaaagccaccaactccagcatccacaccacacagtcagatccccccattgccaggcatgagcaggagcaattcagttgggatccaggatgcctttaatgatggaagtgactccacattccagaagcggaattccatgactccaaaccctgggtatcagcccagtatgaatacctctgacatgatggggcgcatgtcctatgagccaaataaggatccttatggcagcatgaggaaagctccagggagtgatcccttcatgtcctcagggcagggccccaacggcgggatgggtgacccctacagtcgtgctgccggccctgggctaggaaatgtggcgatgggaccacgacagcactatccctatggaggtccttatgacagagtgaggacggagcctggaatagggcctgagggaaacatgagcactggggccccacagccgaatctcatgccttccaacccagactcggggatgtattctcctagccgctaccccccgcagcagcagcagcagcagcagcaacgacatgattcctatggcaatcagttctccacccaaggcaccccttctggcagccccttccccagccagcagactacaatgtatcaacagcaacagcagaattacaagcggccaatggatggcacatatggccctcctgccaagcggcacgaaggggagatgtacagcgtgccatacagcactgggcaggggcagcctcagcagcagcagttgcccccagcccagccccagcctgccagccagcaacaagctgcccagccttcccctcagcaagatgtatacaaccagtatggcaatgcctatcctgccactgccacagctgctactgagcgccgaccagcaggcggcccccagaaccaatttccattccagtttggccgagaccgtgtctctgcaccccctggcaccaatgcccagcaaaacatgccaccacaaatgatgggcggccccatacaggcatcagctgaggttgctcagcaaggcaccatgtggcaggggcgtaatgacatgacctataattatgccaacaggcagagcacgggctctgccccccagggccccgcctatcatggcgtgaaccgaacagatgaaatgctgcacacagatcagagggccaaccacgaaggctcgtggccttcccatggcacacgccagcccccatatggtccctctgcccctgtgccccccatgacaaggccccctccatctaactaccagcccccaccaagcatgcagaatcacattcctcaggtatccagccctgctcccctgccccggccaatggagaaccgcacctctcctagcaagtctccattcctgcactctgggatgaaaatgcagaaggcaggtcccccagtacctgcctcgcacatagcacctgcccctgtgcagccccccatgattcggcgggatatcaccttcccacctggctctgttgaagccacacagcctgtgttgaagcagaggaggcggctcacaatgaaagacattggaaccccggaggcatggcgggtaatgatgtccctcaagtctggtctcctggcagagagcacatgggcattagataccatcaacatcctgctgtatgatgacaacagcatcatgaccttcaacctcagtcagctcccagggttgctagagctccttgtagaatatttccgacgatgcctgattgagatctttggcattttaaaggagtatgaggtgggtgacccaggacagagaacgctactggatcctgggaggttcagcaaggtgtctagtccagctcccatggagggtggggaagaagaagaagaacttctaggtcctaaactagaagaggaagaagaagaggaagtagttgaaaatgatgaggagatagccttttcaggcaaggacaagccagcttcagagaatagtgaggagaagctgatcagtaagtttgacaagcttccagtaaagatcgtacagaagaatgatccatttgtggtggactgctcagataagcttgggcgtgtgcaggagtttgacagtggcctgctgcactggcggattggtgggggggacaccactgagcatatccagacccacttcgagagcaagacagagctgctgccttcccggcctcacgcaccctgcccaccagcccctcggaagcatgtgacaacagcagagggtacaccagggacaacagaccaggaggggcccccacctgatggacctccagaaaaacggatcacagccactatggatgacatgttgtctactcggtctagcaccttgaccgaggatggagctaagagttcagaggccatcaaggagagcagcaagtttccatttggcattagcccagcacagagccaccggaacatcaagatcctagaggacgaaccccacagtaaggatgagaccccactgtgtacccttctggactggcaggattctcttgccaagcgctgcgtctgtgtgtccaataccattcgaagcctgtcatttgtgccaggcaatgactttgagatgtccaaacacccagggctgctgctcatcctgggcaagctgatcctgctgcaccacaagcacccagaacggaagcaggcaccactaacttatgaaaaggaggaggaacaggaccaaggggtgagctgcaacaaagtggagtggtggtgggactgcttggagatgctccgggaaaacaccttggttacactcgccaacatctcggggcagttggacctatctccataccccgagagcatttgcctgcctgtcctggacggactcctacactgggcagtttgcccttcagctgaagcccaggaccccttttccaccctgggccccaatgccgtcctttccccgcagagactggtcttggaaaccctcagcaaactcagcatccaggacaacaatgtggacctgattctggccacaccccccttcagccgcctggagaagttgtatagcactatggtgcgcttcctcagtgaccgaaagaacccggtgtgccgggagatggctgtggtactgctggccaacctggctcagggggacagcctggcagctcgtgccattgcagtgcagaagggcagtatcggcaacctcctgggcttcctagaggacagccttgccgccacacagttccagcagagccaggccagcctcctccacatgcagaacccaccctttgagccaactagtgtggacatgatgcggcgggctgcccgcgcgctgcttgccttggccaaggtggacgagaaccactcagagtttactctgtacgaatcacggctgttggacatctcggtatcaccgttgatgaactcattggtttcacaagtcatttgtgatgtactgtttttgattggccagtcatgacagccgtgggacacctcccccccccgtgtgtgtgtgcgtgtgtggagaacttagaaactgactgttgccctttatttatgcaaaaccacctcagaatccagtttaccctgtgctgtccagcttctcccttgggaaaaagtctctcctgtttctctctcctccttccacctcccctccctccatcacctcacgcctttctgttccttgtcctcaccttactcccctcaggaccctaccccaccctctttgaaaagacaaagctctgcctacatagaagactttttttattttaaccaaagttactgttgtttacagtgagtttggggaaaaaaaataaaataaaaatggctttcccagtccttgcatcaacgggatgccacatttcataactgtttttaatggtaaaaaaaaaaaaaaaaaatacaaaaaaaaattctgaaggacaaaaaaggtgactgctgaactgtgtgtggtttattgttgtacattcacaatcttgcaggagccaagaagttcgcagttgtgaacagaccctgttcactggagaggcctgtgcagtagagtgtagaccctttcatgtactgtactgtacacctgatactgtaaacatactgtaataataatgtctcacatggaaacagaaaacgctgggtcagcagcaagctgtagtttttaaaaatgtttttagttaaacgttgaggagaaaaaaaaaaaaggcttttcccccaaagtatcatgtgtgaacctacaacaccctgacctctttctctcctccttgattgtatgaataaccctgagatcacctcttagaactggttttaacctttagctgcagcggctacgctgccacgtgtgtatatatatgacgttgtacattgcacatacccttggatccccacagtttggtcctcctcccagctacccctttatagtatgacgagttaacaagttggtgacctgcacaaagcgagacacagctatttaatctcttgccagatatcgcccctcttggtgcgatgctgtacaggtctctgtaaaaagtccttgctgtctcagcagccaatcaacttatagtttatttttttctgggtttttgttttgttttgttttctttctaatcgaggtgtgaaaaagttctaggttcagttgaagttctgatgaagaaacacaattgagattttttcagtgataaaatctgcatatttgtatttcaacaatgtagctaaaacttgatgtaaattcctcctttttttccttttttggcttaatgaatatcatttattcagtatgaaatctttatactatatgttccacgtgttaagaataaatgtacattaaatcttggtaagacttt

SEQ ID NO: 21 - DNA, 8585 bp, Homo sapiens
cagaaagcggagagtcacagcggggccaggccctggggagcggagcctccaccgcccccctcattcccaggcaagggcttggggggaatgagccgggagagccgggtcccgagcctacagagccgggagcagctgagccgccggcgcctcggccgccgccgccgcctcctcctcctccgccgccgccagcccggagcctgagccggcggggcgggggggagaggagcgagcgcagcgcagcagcggagccccgcgaggcccgcccgggcgggtggggagggcagcccgggggactgggccccggggcggggtgggagggggggagaagacgaagacagggccgggtctctccgcggacgagacagcggggatcatggccgcgcaggtcgcccccgccgccgccagcagcctgggcaacccgccgccgccgccgccctcggagctgaagaaagccgagcagcagcagcgggaggaggcggggggcgaggcggcggcggcggcagcggccgagcgcggggaaatgaaggcagccgccgggcaggaaagcgagggccccgccgtggggccgccgcagccgctgggaaaggagctgcaggacggggccgagagcaatgggggtggcggcggcggcggagccggcagcggcggcgggcccggcgcggagccggacctgaagaactcgaacgggaacgcgggccctaggcccgccctgaacaataacctcacggagccgcccggcggcggcggtggcggcagcagcgatggggtgggggcgcctcctcactcagccgcggccgccttgccgcccccagcctacggcttcgggcaaccctacggccggagcccgtctgccgtcgccgccgccgcggccgccgtcttccaccaacaacatggcggacaacaaagccctggcctggcagcgctgcagagcggcggcggcgggggcctggagccctacgcggggccccagcagaactctcacgaccacggcttccccaaccaccagtacaactcctactaccccaaccgcagcgcctaccccccgcccgccccggcctacgcgctgagctccccgagaggtggcactccgggctccggcgcggcggcggctgccggctccaagccgcctccctcctccagcgcctccgcctcctcgtcgtcttcgtccttcgctcagcagcgcttcggggccatggggggaggcggcccctccgcggccggcgggggaactccccagcccaccgccacccccaccctcaaccaactgctcacgtcgcccagctcggcccggggctaccagggctaccccgggggcgactacagtggcgggccccaggacgggggcgccggcaagggcccggcggacatggcctcgcagtgttggggggctgcggcggcggcagctgcggcggcggccgcctcgggaggggcccaacaaaggagccaccacgcgcccatgagccccgggagcagcggcggcggggggcagccgctcgcccggacccctcagccatccagtccaatggatcagatgggcaagatgagacctcagccatatggcgggactaacccatactcgcagcaacagggacctccgtcaggaccgcagcaaggacatgggtacccagggcagccatacgggtcccagaccccgcagcggtacccgatgaccatgcagggccgggcgcagagtgccatgggcggcctctcttatacacagcagattcctccttatggacaacaaggccccagcgggtatggtcaacagggccagactccatattacaaccagcaaagtcctcaccctcagcagcagcagccaccctactcccagcaaccaccgtcccagacccctcatgcccaaccttcgtatcagcagcagccacagtctcaaccaccacagctccagtcctctcagcctccatactcccagcagccatcccagcctccacatcagcagtccccggctccatacccctcccagcagtcgacgacacagcagcacccccagagccagcccccctactcacagccacaggctcagtctccttaccagcagcagcaacctcagcagccagcaccctcgacgctctcccagcaggctgcgtatcctcagccccagtctcagcagtcccagcaaactgcctattcccagcagcgcttccctccaccgcaggagctatctcaagattcatttgggtctcaggcatcctcagccccctcaatgacctccagtaagggagggcaagaagatatgaacctgagccttcagtcaagaccctccagcttgcctgatctatctggttcaatagatgacctccccatggggacagaaggagctctgagtcctggagtgagcacatcagggatttccagcagccaaggagagcagagtaatccagctcagtctcctttctctcctcatacctcccctcacctgcctggcatccgaggcccttccccgtcccctgttggctctcccgccagtgttgctcagtctcgctcaggaccactctcgcctgctgcagtgccaggcaaccagatgccacctcggccacccagtggccagtcggacagcatcatgcatccttccatgaaccaatcaagcattgcccaagatcgaggttatatgcagaggaacccccagatgccccagtacagttccccccagcccggctcagccttatctccgcgtcagccttccggaggacagatacacacaggcatgggctcctaccagcagaactccatggggagctatggtccccaggggggtcagtatggcccacaaggtggctaccccaggcagccaaactataatgccttgcccaatgccaactaccccagtgcaggcatggctggaggcataaaccccatgggtgccggaggtcaaatgcatggacagcctggcatcccaccttatggcacactccctccagggaggatgagtcacgcctccatgggcaaccggccttatggccctaacatggccaatatgccacctcaggttgggtcagggatgtgtcccccaccagggggcatgaaccggaaaacccaagaaactgctgtcgccatgcatgttgctgccaactctatccaaaacaggccgccaggctaccccaatatgaatcaagggggcatgatgggaactggacctccttatggacaagggattaatagtatggctggcatgatcaaccctcagggacccccatattccatgggtggaaccatggccaacaattctgcagggatggcagccagcccagagatgatgggccttggggatgtaaagttaactccagccaccaaaatgaacaacaaggcagatgggacacccaagacagaatccaaatccaagaaatccagttcttctactacaaccaatgagaagatcaccaagttgtatgagctgggtggtgagcctgagaggaagatgtgggtggaccgttatctggccttcactgaggagaaggccatgggcatgacaaatctgcctgctgtgggtaggaaacctctggacctctatcgcctctatgtgtctgtgaaggagattggtggattgactcaggtcaacaagaacaaaaaatggcgggaacttgcaaccaacctcaatgtgggcacatcaagcagtgctgccagctccttgaaaaagcagtatatccagtgtctctatgcctttgaatgcaagattgaacggggagaagaccctcccccagacatctttgcagctgctgattccaagaagtcccagcccaagatccagcctccctctcctgcgggatcaggatctatgcaggggccccagactccccagtcaaccagcagttccatggcagaaggaggagacttaaagccaccaactccagcatccacaccacacagtcagatccccccattgccaggcatgagcaggagcaattcagttgggatccaggatgcctttaatgatggaagtgactccacattccagaagcggaattccatgactccaaaccctgggtatcagcccagtatgaatacctctgacatgatggggcgcatgtcctatgagccaaataaggatccttatggcagcatgaggaaagctccagggagtgatcccttcatgtcctcagggcagggccccaacggcgggatgggtgacccctacagtcgtgctgccggccctgggctaggaaatgtggcgatgggaccacgacagcactatccctatggaggtccttatgacagagtgaggacggagcctggaatagggcctgagggaaacatgagcactggggccccacagccgaatctcatgccttccaacccagactcggggatgtattctcctagccgctaccccccgcagcagcagcagcagcagcagcaacgacatgattcctatggcaatcagttctccacccaaggcaccccttctggcagccccttccccagccagcagactacaatgtatcaacagcaacagcagaattacaagcggccaatggatggcacatatggccctcctgccaagcggcacgaaggggagatgtacagcgtgccatacagcactgggcaggggcagcctcagcagcagcagttgcccccagcccagccccagcctgccagccagcaacaagctgcccagccttcccctcagcaagatgtatacaaccagtatggcaatgcctatcctgccactgccacagctgctactgagcgccgaccagcaggcggcccccagaaccaatttccattccagtttggccgagaccgtgtctctgcaccccctggcaccaatgcccagcaaaacatgccaccacaaatgatgggcggccccatacaggcatcagctgaggttgctcagcaaggcaccatgtggcaggggcgtaatgacatgacctataattatgccaacaggcagagcacgggctctgccccccagggccccgcctatcatggcgtgaaccgaacagatgaaatgctgcacacagatcagagggccaaccacgaaggctcgtggccttcccatggcacacgccagcccccatatggtccctctgcccctgtgccccccatgacaaggccccctccatctaactaccagcccccaccaagcatgcagaatcacattcctcaggtatccagccctgctcccctgccccggccaatggagaaccgcacctctcctagcaagtctccattcctgcactctgggatgaaaatgcagaaggcaggtcccccagtacctgcctcgcacatagcacctgcccctgtgcagccccccatgattcggcgggatatcaccttcccacctggctctgttgaagccacacagcctgtgttgaagcagaggaggcggctcacaatgaaagacattggaaccccggaggcatggcgggtaatgatgtccctcaagtctggtctcctggcagagagcacatgggcattagataccatcaacatcctgctgtatgatgacaacagcatcatgaccttcaacctcagtcagctcccagggttgctagagctccttgtagaatatttctgacgatgcctgattgagatctttggcattttaaaggagtatgaggtgggtgacccaggacagagaacgctactggatcctgggaggttcagcaaggtgtctagtccagctcccatggagggtggggaagaagaagaagaacttctaggtcctaaactagaagaggaagaagaagaggaagtagttgaaaatgatgaggagatagccttttcaggcaaggacaagccagcttcagagaatagtgaggagaagctgatcagtaagtttgacaagcttccagtaaagatcgtacagaagaatgatccatttgtggtggactgctcagataagcttgggcgtgtgcaggagtttgacagtggcctgctgcactggcggattggtgggggggacaccactgagcatatccagacccacttcgagagcaagacagagctgctgccttcccggcctcacgcaccctgcccaccagcccctcggaagcatgtgacaacagcagagggtacaccagggacaacagaccaggaggggcccccacctgatggacctccagaaaaacggatcacagccactatggatgacatgttgtctactcggtctagcaccttgaccgaggatggagctaagagttcagaggccatcaaggagagcagcaagtttccatttggcattagcccagcacagagccaccggaacatcaagatcctagaggacgaaccccacagtaaggatgagaccccactgtgtacccttctggactggcaggattctcttgccaagcgctgcgtctgtgtgtccaataccattcgaagcctgtcatttgtgccaggcaatgactttgagatgtccaaacacccagggctgctgctcatcctgggcaagctgatcctgctgcaccacaagcacccagaacggaagcaggcaccactaacttatgaaaaggaggaggaacaggaccaaggggtgagctgcaacaaagtggagtggtggtgggactgcttggagatgctccgggaaaacaccttggttacactcgccaacatctcggggcagttggacctatctccataccccgagagcatttgcctgcctgtcctggacggactcctacactgggcagtttgcccttcagctgaagcccaggaccccttttccaccctgggccccaatgccgtcctttccccgcagagactggtcttggaaaccctcagcaaactcagcatccaggacaacaatgtggacctgattctggccacaccccccttcagccgcctggagaagttgtatagcactatggtgcgcttcctcagtgaccgaaagaacccggtgtgccgggagatggctgtggtactgctggccaacctggctcagggggacagcctggcagctcgtgccattgcagtgcagaagggcagtatcggcaacctcctgggcttcctagaggacagccttgccgccacacagttccagcagagccaggccagcctcctccacatgcagaacccaccctttgagccaactagtgtggacatgatgcggcgggctgcccgcgcgctgcttgccttggccaaggtggacgagaaccactcagagtttactctgtacgaatcacggctgttggacatctcggtatcaccgttgatgaactcattggtttcacaagtcatttgtgatgtactgtttttgattggccagtcatgacagccgtgggacacctcccccccccgtgtgtgtgtgcgtgtgtggagaacttagaaactgactgttgccctttatttatgcaaaaccacctcagaatccagtttaccctgtgctgtccagcttctcccttgggaaaaagtctctcctgtttctctctcctccttccacctcccctccctccatcacctcacgcctttctgttccttgtcctcaccttactcccctcaggaccctaccccaccctctttgaaaagacaaagctctgcctacatagaagactttttttattttaaccaaagttactgttgtttacagtgagtttggggaaaaaaaataaaataaaaatggctttcccagtccttgcatcaacgggatgccacatttcataactgtttttaatggtaaaaaaaaaaaaaaaaaatacaaaaaaaaattctgaaggacaaaaaaggtgactgctgaactgtgtgtggtttattgttgtacattcacaatcttgcaggagccaagaagttcgcagttgtgaacagaccctgttcactggagaggcctgtgcagtagagtgtagaccctttcatgtactgtactgtacacctgatactgtaaacatactgtaataataatgtctcacatggaaacagaaaacgctgggtcagcagcaagctgtagtttttaaaaatgtttttagttaaacgttgaggagaaaaaaaaaaaaggcttttcccccaaagtatcatgtgtgaacctacaacaccctgacctctttctctcctccttgattgtatgaataaccctgagatcacctcttagaactggttttaacctttagctgcagcggctacgctgccacgtgtgtatatatatgacgttgtacattgcacatacccttggatccccacagtttggtcctcctcccagctacccctttatagtatgacgagttaacaagttggtgacctgcacaaagcgagacacagctatttaatctcttgccagatatcgcccctcttggtgcgatgctgtacaggtctctgtaaaaagtccttgctgtctcagcagccaatcaacttatagtttatttttttctgggtttttgttttgttttgttttctttctaatcgaggtgtgaaaaagttctaggttcagttgaagttctgatgaagaaacacaattgagattttttcagtgataaaatctgcatatttgtatttcaacaatgtagctaaaacttgatgtaaattcctcctttttttccttttttggcttaatgaatatcatttattcagtatgaaatctttatactatatgttccacgtgttaagaataaatgtacattaaatcttggtaagacttt

SEQ ID NO: 22 - DNA, 8586 bp, Homo sapiens
cagaaagcggagagtcacagcggggccaggccctggggagcggagcctccaccgcccccctcattcccaggcaagggcttggggggaatgagccgggagagccgggtcccgagcctacagagccgggagcagctgagccgccggcgcctcggccgccgccgccgcctcctcctcctccgccgccgccagcccggagcctgagccggcggggcgggggggagaggagcgagcgcagcgcagcagcggagccccgcgaggcccgcccgggcgggtggggagggcagcccgggggactgggccccggggcggggtgggagggggggagaagacgaagacagggccgggtctctccgcggacgagacagcggggatcatggccgcgcaggtcgcccccgccgccgccagcagcctgggcaacccgccgccgccgccgccctcggagctgaagaaagccgagcagcagcagcgggaggaggcggggggcgaggcggcggcggcggcagcggccgagcgcggggaaatgaaggcagccgccgggcaggaaagcgagggccccgccgtggggccgccgcagccgctgggaaaggagctgcaggacggggccgagagcaatgggggtggcggcggcggcggagccggcagcggcggcgggcccggcgcggagccggacctgaagaactcgaacgggaacgcgggccctaggcccgccctgaacaataacctcacggagccgcccggcggcggcggtggcggcagcagcgatggggtgggggcgcctcctcactcagccgcggccgccttgccgcccccagcctacggcttcgggcaaccctacggccggagcccgtctgccgtcgccgccgccgcggccgccgtcttccaccaacaacatggcggacaacaaagccctggcctggcagcgctgcagagcggcggcggcgggggcctggagccctacgcggggccccagcagaactctcacgaccacggcttccccaaccaccagtacaactcctactaccccaaccgcagcgcctaccccccgcccgccccggcctacgcgctgagctccccgagaggtggcactccgggctccggcgcggcggcggctgccggctccaagccgcctccctcctccagcgcctccgcctcctcgtcgtcttcgtccttcgctcagcagcgcttcggggccatggggggaggcggcccctccgcggccggcgggggaactccccagcccaccgccacccccaccctcaaccaactgctcacgtcgcccagctcggcccggggctaccagggctaccccgggggcgactacagtggcgggccccaggacgggggcgccggcaagggcccggcggacatggcctcgcagtgttggggggctgcggcggcggcagctgcggcggcggccgcctcgggaggggcccaacaaaggagccaccacgcgcccatgagccccgggagcagcggcggcggggggcagccgctcgcccggacccctcagccatccagtccaatggatcagatgggcaagatgagacctcagccatatggcgggactaacccatactcgcagcaacagggacctccgtcaggaccgcagcaaggacatgggtacccagggcagccatacgggtcccagaccccgcagcggtacccgatgaccatgcagggccgggcgcagagtgccatgggcggcctctcttatacacagcagattcctccttatggacaacaaggccccagcgggtatggtcaacagggccagactccatattacaaccagcaaagtcctcaccctcagcagcagcagccaccctactcccagcaaccaccgtcccagacccctcatgcccaaccttcgtatcagcagcagccacagtctcaaccaccacagctccagtcctctcagcctccatactcccagcagccatcccagcctccacatcagcagtccccggctccatacccctcccagcagtcgacgacacagcagcacccccagagccagcccccctactcacagccacaggctcagtctccttaccagcagcagcaacctcagcagccagcaccctcgacgctctcccagcaggctgcgtatcctcagccccagtctcagcagtcccagcaaactgcctattcccagcagcgcttccctccaccgcaggagctatctcaagattcatttgggtctcaggcatcctcagccccctcaatgacctccagtaagggagggcaagaagatatgaacctgagccttcagtcaagaccctccagcttgcctgatctatctggttcaatagatgacctccccatggggacagaaggagctctgagtcctggagtgagcacatcagggatttccagcagccaaggagagcagagtaatccagctcagtctcctttctctcctcatacctcccctcacctgcctggcatccgaggcccttccccgtcccctgttggctctcccgccagtgttgctcagtctcgctcaggaccactctcgcctgctgcagtgccaggcaaccagatgccacctcggccacccagtggccagtcggacagcatcatgcatccttccatgaaccaatcaagcattgcccaagatcgaggttatatgcagaggaacccccagatgccccagtacagttccccccagcccggctcagccttatctccgcgtcagccttccggaggacagatacacacaggcatgggctcctaccagcagaactccatggggagctatggtccccaggggggtcagtatggcccacaaggtggctaccccaggcagccaaactataatgccttgcccaatgccaactaccccagtgcaggcatggctggaggcataaaccccatgggtgccggaggtcaaatgcatggacagcctggcatcccaccttatggcacactccctccagggaggatgagtcacgcctccatgggcaaccggccttatggccctaacatggccaatatgccacctcaggttgggtcagggatgtgtcccccaccagggggcatgaaccggaaaacccaagaaactgctgtcgccatgcatgttgctgccaactctatccaaaacaggccgccaggctaccccaatatgaatcaagggggcatgatgggaactggacctccttatggacaagggattaatagtatggctggcatgatcaaccctcagggacccccatattccatgggtggaaccatggccaacaattctgcagggatggcagccagcccagagatgatgggccttggggatgtaaagttaactccagccaccaaaatgaacaacaaggcagatgggacacccaagacagaatccaaatccaagaaatccagttcttctactacaaccaatgagaagatcaccaagttgtatgagctgggtggtgagcctgagaggaagatgtgggtggaccgttatctggccttcactgaggagaaggccatgggcatgacaaatctgcctgctgtgggtaggaaacctctggacctctatcgcctctatgtgtctgtgaaggagattggtggattgactcaggtcaacaagaacaaaaaatggcgggaacttgcaaccaacctcaatgtgggcacatcaagcagtgctgccagctccttgaaaaagcagtatatccagtgtctctatgcctttgaatgcaagattgaacggggagaagaccctcccccagacatctttgcagctgctgattccaagaagtcccagcccaagatccagcctccctctcctgcgggatcaggatctatgcaggggccccagactccccagtcaaccagcagttccatggcagaaggaggagacttaaagccaccaactccagcatccacaccacacagtcagatccccccattgccaggcatgagcaggagcaattcagttgggatccaggatgcctttaatgatggaagtgactccacattccagaagcggaattccatgactccaaaccctgggtatcagcccagtatgaatacctctgacatgatggggcgcatgtcctatgagccaaataaggatccttatggcagcatgaggaaagctccagggagtgatcccttcatgtcctcagggcagggccccaacggcgggatgggtgacccctacagtcgtgctgccggccctgggctaggaaatgtggcgatgggaccacgacagcactatccctatggaggtccttatgacagagtgaggacggagcctggaatagggcctgagggaaacatgagcactggggccccacagccgaatctcatgccttccaacccagactcggggatgtattctcctagccgctaccccccgcagcagcagcagcagcagcagcaacgacatgattcctatggcaatcagttctccacccaaggcaccccttctggcagccccttccccagccagcagactacaatgtatcaacagcaacagcagaattacaagcggccaatggatggcacatatggccctcctgccaagcggcacgaaggggagatgtacagcgtgccatacagcactgggcaggggcagcctcagcagcagcagttgcccccagcccagccccagcctgccagccagcaacaagctgcccagccttcccctcagcaagatgtatacaaccagtatggcaatgcctatcctgccactgccacagctgctactgagcgccgaccagcaggcggcccccagaaccaatttccattccagtttggccgagaccgtgtctctgcaccccctggcaccaatgcccagcaaaacatgccaccacaaatgatgggcggccccatacaggcatcagctgaggttgctcagcaaggcaccatgtggcaggggcgtaatgacatgacctataattatgccaacaggcagagcacgggctctgccccccagggccccgcctatcatggcgtgaaccgaacagatgaaatgctgcacacagatcagagggccaaccacgaaggctcgtggccttcccatggcacacgccagcccccatatggtccctctgcccctgtgccccccatgacaaggccccctccatctaactaccagcccccaccaagcatgcagaatcacattcctcaggtatccagccctgctcccctgccccggccaatggagaaccgcacctctcctagcaagtctccattcctgcactctgggatgaaaatgcagaaggcaggtcccccagtacctgcctcgcacatagcacctgcccctgtgcagccccccatgattcggcgggatatcaccttcccacctggctctgttgaagccacacagcctgtgttgaagcagaggaggcggctcacaatgaaagacattggaaccccggaggcatggcgggtaatgatgtccctcaagtctggtctcctggcagagagcacatgggcattagataccatcaacatcctgctgtatgatgacaacagcatcatgaccttcaacctcagtcagctcccagggttgctagagctccttgtagaatatttccgacgatgcctgattgagatctttggcattttaaaggagtatgaggtgggtgacccaggacagagaacgctactggatcctgggaggttcagcaaggtgtctagtccagctcccatggagggtggggaagaagaagaagaacttctaggtcctaaactagaagaggaagaagaagaggaagtagttgaaaatgatgaggagatagccttttcaggcaaggacaagccagcttcagagaatagtgaggagaagctgatcagtaagtttgacaagcttccagtaaagatcgtacagaagaatgatccatttgtggtggactgctcagataagcttgggcgtgtgcaggagtttgacagtggcctgctgcactggcggattgggtgggggggacaccactgagcatatccagacccacttcgagagcaagacagagctgctgccttcccggcctcacgcaccctgcccaccagcccctcggaagcatgtgacaacagcagagggtacaccagggacaacagaccaggaggggcccccacctgatggacctccagaaaaacggatcacagccactatggatgacatgttgtctactcggtctagcaccttgaccgaggatggagctaagagttcagaggccatcaaggagagcagcaagtttccatttggcattagcccagcacagagccaccggaacatcaagatcctagaggacgaaccccacagtaaggatgagaccccactgtgtacccttctggactggcaggattctcttgccaagcgctgcgtctgtgtgtccaataccattcgaagcctgtcatttgtgccaggcaatgactttgagatgtccaaacacccagggctgctgctcatcctgggcaagctgatcctgctgcaccacaagcacccagaacggaagcaggcaccactaacttatgaaaaggaggaggaacaggaccaaggggtgagctgcaacaaagtggagtggtggtgggactgcttggagatgctccgggaaaacaccttggttacactcgccaacatctcggggcagttggacctatctccataccccgagagcatttgcctgcctgtcctggacggactcctacactgggcagtttgcccttcagctgaagcccaggaccccttttccaccctgggccccaatgccgtcctttccccgcagagactggtcttggaaaccctcagcaaactcagcatccaggacaacaatgtggacctgattctggccacaccccccttcagccgcctggagaagttgtatagcactatggtgcgcttcctcagtgaccgaaagaacccggtgtgccgggagatggctgtggtactgctggccaacctggctcagggggacagcctggcagctcgtgccattgcagtgcagaagggcagtatcggcaacctcctgggcttcctagaggacagccttgccgccacacagttccagcagagccaggccagcctcctccacatgcagaacccaccctttgagccaactagtgtggacatgatgcggcgggctgcccgcgcgctgcttgccttggccaaggtggacgagaaccactcagagtttactctgtacgaatcacggctgttggacatctcggtatcaccgttgatgaactcattggtttcacaagtcatttgtgatgtactgtttttgattggccagtcatgacagccgtgggacacctcccccccccgtgtgtgtgtgcgtgtgtggagaacttagaaactgactgttgccctttatttatgcaaaaccacctcagaatccagtttaccctgtgctgtccagcttctcccttgggaaaaagtctctcctgtttctctctcctccttccacctcccctccctccatcacctcacgcctttctgttccttgtcctcaccttactcccctcaggaccctaccccaccctctttgaaaagacaaagctctgcctacatagaagactttttttattttaaccaaagttactgttgtttacagtgagtttggggaaaaaaaataaaataaaaatggctttcccagtccttgcatcaacgggatgccacatttcataactgtttttaatggtaaaaaaaaaaaaaaaaaatacaaaaaaaaattctgaaggacaaaaaaggtgactgctgaactgtgtgtggtttattgttgtacattcacaatcttgcaggagccaagaagttcgcagttgtgaacagaccctgttcactggagaggcctgtgcagtagagtgtagaccctttcatgtactgtactgtacacctgatactgtaaacatactgtaataataatgtctcacatggaaacagaaaacgctgggtcagcagcaagctgtagtttttaaaaatgtttttagttaaacgttgaggagaaaaaaaaaaaaggcttttcccccaaagtatcatgtgtgaacctacaacaccctgacctctttctctcctccttgattgtatgaataaccctgagatcacctcttagaactggttttaacctttagctgcagcggctacgctgccacgtgtgtatatatatgacgttgtacattgcacatacccttggatccccacagtttggtcctcctcccagctacccctttatagtatgacgagttaacaagttggtgacctgcacaaagcgagacacagctatttaatctcttgccagatatcgcccctcttggtgcgatgctgtacaggtctctgtaaaaagtccttgctgtctcagcagccaatcaacttatagtttatttttttctgggtttttgttttgttttgttttctttctaatcgaggtgtgaaaaagttctaggttcagttgaagttctgatgaagaaacacaattgagattttttcagtgataaaatctgcatatttgtatttcaacaatgtagctaaaacttgatgtaaattcctcctttttttccttttttggcttaatgaatatcatttattcagtatgaaatctttatactatatgttccacgtgttaagaataaatgtacattaaatcttggtaagacttt

SEQ ID NO: 23 - DNA, 8585 bp, Homo sapiens
cagaaagcggagagtcacagcggggccaggccctggggagcggagcctccaccgcccccctcattcccaggcaagggcttggggggaatgagccgggagagccgggtcccgagcctacagagccgggagcagctgagccgccggcgcctcggccgccgccgccgcctcctcctcctccgccgccgccagcccggagcctgagccggcggggcgggggggagaggagcgagcgcagcgcagcagcggagccccgcgaggcccgcccgggcgggtggggagggcagcccgggggactgggccccggggcggggtgggagggggggagaagacgaagacagggccgggtctctccgcggacgagacagcggggatcatggccgcgcaggtcgcccccgccgccgccagcagcctgggcaacccgccgccgccgccgccctcggagctgaagaaagccgagcagcagcagcgggaggaggcggggggcgaggcggcggcggcggcagcggccgagcgcggggaaatgaaggcagccgccgggcaggaaagcgagggccccgccgtggggccgccgcagccgctgggaaaggagctgcaggacggggccgagagcaatgggggtggcggcggcggcggagccggcagcggcggcgggcccggcgcggagccggacctgaagaactcgaacgggaacgcgggccctaggcccgccctgaacaataacctcacggagccgcccggcggcggcggtggcggcagcagcgatggggtgggggcgcctcctcactcagccgcggccgccttgccgcccccagcctacggcttcgggcaaccctacggccggagcccgtctgccgtcgccgccgccgcggccgccgtcttccaccaacaacatggcggacaacaaagccctggcctggcagcgctgcagagcggcggcggcgggggcctggagccctacgcggggccccagcagaactctcacgaccacggcttccccaaccaccagtacaactcctactaccccaaccgcagcgcctaccccccgcccgccccggcctacgcgctgagctccccgagaggtggcactccgggctccggcgcggcggcggctgccggctccaagccgcctccctcctccagcgcctccgcctcctcgtcgtcttcgtccttcgctcagcagcgcttcggggccatggggggaggcggcccctccgcggccggcgggggaactccccagcccaccgccacccccaccctcaaccaactgctcacgtcgcccagctcggcccggggctaccagggctaccccgggggcgactacagtggcgggccccaggacgggggcgccggcaagggcccggcggacatggcctcgcagtgttggggggctgcggcggcggcagctgcggcggcggccgcctcgggaggggcccaacaaaggagccaccacgcgcccatgagccccgggagcagcggcggcggggggcagccgctcgcccggacccctcagccatccagtccaatggatcagatgggcaagatgagacctcagccatatggcgggactaacccatactcgcagcaacagggacctccgtcaggaccgcagcaaggacatgggtacccagggcagccatacgggtcccagaccccgcagcggtacccgatgaccatgcagggccgggcgcagagtgccatgggcggcctctcttatacacagcagattcctccttatggacaacaaggccccagcgggtatggtcaacagggccagactccatattacaaccagcaaagtcctcaccctcagcagcagcagccaccctactcccagcaaccaccgtcccagacccctcatgcccaaccttcgtatcagcagcagccacagtctcaaccaccacagctccagtcctctcagcctccatactcccagcagccatcccagcctccacatcagcagtccccggctccatacccctcccagcagtcgacgacacagcagcacccccagagccagcccccctactcacagccacaggctcagtctccttaccagcagcagcaacctcagcagccagcaccctcgacgctctcccagcaggctgcgtatcctcagccccagtctcagcagtcccagcaaactgcctattcccagcagcgcttccctccaccgcaggagctatctcaagattcatttgggtctcaggcatcctcagccccctcaatgacctccagtaagggagggcaagaagatatgaacctgagccttcagtcaagaccctccagcttgcctgatctatctggttcaatagatgacctccccatggggacagaaggagctctgagtcctggagtgagcacatcagggatttccagcagccaaggagagcagagtaatccagctcagtctcctttctctcctcatacctcccctcacctgcctggcatccgaggcccttccccgtcccctgttggctctcccgccagtgttgctcagtctcgctcaggaccactctcgcctgctgcagtgccaggcaaccagatgccacctcggccacccagtggccagtcggacagcatcatgcatccttccatgaaccaatcaagcattgcccaagatcgaggttatatgcagaggaacccccagatgccccagtacagttccccccagcccggctcagccttatctccgcgtcagccttccggaggacagatacacacaggcatgggctcctaccagcagaactccatggggagctatggtccccaggggggtcagtatggcccacaaggtggctaccccaggcagccaaactataatgccttgcccaatgccaactaccccagtgcaggcatggctggaggcataaaccccatgggtgccggaggtcaaatgcatggacagcctggcatcccaccttatggcacactccctccagggaggatgagtcacgcctccatgggcaaccggccttatggccctaacatggccaatatgccacctcaggttgggtcagggatgtgtcccccaccagggggcatgaaccggaaaacccaagaaactgctgtcgccatgcatgttgctgccaactctatccaaaacaggccgccaggctaccccaatatgaatcaagggggcatgatgggaactggacctccttatggacaagggattaatagtatggctggcatgatcaaccctcagggacccccatattccatgggtggaaccatggccaacaattctgcagggatggcagccagcccagagatgatgggccttggggatgtaaagttaactccagccaccaaaatgaacaacaaggcagatgggacacccaagacagaatccaaatccaagaaatccagttcttctactacaaccaatgagaagatcaccaagttgtatgagctgggtggtgagcctgagaggaagatgtgggtggaccgttatctggccttcactgaggagaaggccatgggcatgacaaatctgcctgctgtgggtaggaaacctctggacctctatcgcctctatgtgtctgtgaaggagattggtggattgactcaggtcaacaagaacaaaaaatggcgggaacttgcaaccaacctcaatgtgggcacatcaagcagtgctgccagctccttgaaaaagcagtatatccagtgtctctatgcctttgaatgcaagattgaacggggagaagaccctcccccagacatctttgcagctgctgattccaagaagtcccagcccaagatccagcctccctctcctgcgggatcaggatctatgcaggggccccagactccccagtcaaccagcagttccatggcagaaggaggagacttaaagccaccaactccagcatccacaccacacagtcagatccccccattgccaggcatgagcaggagcaattcagttgggatccaggatgcctttaatgatggaagtgactccacattccagaagcggaattccatgactccaaaccctgggtatcagcccagtatgaatacctctgacatgatggggcgcatgtcctatgagccaaataaggatccttatggcagcatgaggaaagctccagggagtgatcccttcatgtcctcagggcagggccccaacggcgggatgggtgacccctacagtcgtgctgccggccctgggctaggaaatgtggcgatgggaccacgacagcactatccctatggaggtccttatgacagagtgaggacggagcctggaatagggcctgagggaaacatgagcactggggccccacagccgaatctcatgccttccaacccagactcggggatgtattctcctagccgctaccccccgcagcagcagcagcagcagcagcaacgacatgattcctatggcaatcagttctccacccaaggcaccccttctggcagccccttccccagccagcagactacaatgtatcaacagcaacagcagaattacaagcggccaatggatggcacatatggccctcctgccaagcggcacgaaggggagatgtacagcgtgccatacagcactgggcaggggcagcctcagcagcagcagttgcccccagcccagccccagcctgccagccagcaacaagctgcccagccttcccctcagcaagatgtatacaaccagtatggcaatgcctatcctgccactgccacagctgctactgagcgccgaccagcaggcggcccccagaaccaatttccattccagtttggccgagaccgtgtctctgcaccccctggcaccaatgcccagcaaaacatgccaccacaaatgatgggcggccccatacaggcatcagctgaggttgctcagcaaggcaccatgtggcaggggcgtaatgacatgacctataattatgccaacaggcagagcacgggctctgccccccagggccccgcctatcatggcgtgaaccgaacagatgaaatgctgcacacagatcagagggccaaccacgaaggctcgtggccttcccatggcacacgccagcccccatatggtccctctgcccctgtgccccccatgacaaggccccctccatctaactaccagcccccaccaagcatgcagaatcacattcctcaggtatccagccctgctcccctgccccggccaatggagaaccgcacctctcctagcaagtctccattcctgcactctgggatgaaaatgcagaaggcaggtcccccagtacctgcctcgcacatagcacctgcccctgtgcagccccccatgattcggcgggatatcaccttcccacctggctctgttgaagccacacagcctgtgttgaagcagaggaggcggctcacaatgaaagacattggaaccccggaggcatggcgggtaatgatgtccctcaagtctggtctcctggcagagagcacatgggcattagataccatcaacatcctgctgtatgatgacaacagcatcatgaccttcaacctcagtcagctcccagggttgctagagctccttgtagaatatttccgacgatgcctgattgagatctttggcattttaaaggagtatgaggtgggtgacccaggacagagaacgctactggatcctgggaggttcagcaaggtgtctagtccagctcccatggagggtggggaagaagaagaagaacttctaggtcctaaactagaagaggaagaagaagaggaagtagttgaaaatgatgaggagatagccttttcaggcaaggacaagccagcttcagagaatagtgaggagaagctgatcagtaagtttgacaagcttccagtaaagatcgtacagaagaatgatccatttgtggtggactgctcagataagcttgggcgtgtgcaggagtttgacagtggcctgctgcactggcggattggtgggggggacaccactgagcatatccagacccacttcgagagcaagacagagctgctgccttcccggcctcacgcaccctgcccaccagcccctcggaagcatgtgacaacagcagagggtacaccagggacaacagaccaggaggggcccccacctgatggacctccagaaaaacggatcacagccactatggatgacatgttgtctactcggtctagcaccttgaccgaggatggagctaagagttcagaggccatcaaggagagcagcaagtttccatttggcattagcccagcacagagccaccggaacatcaagatcctagaggacgaaccccacagtaaggatgagaccccactgtgtacccttctggactggcaggattctcttgccaagcgctgcgtctgtgtgcccaataccattcgaagcctgtcatttgtgccaggcaatgactttgagatgtccaaacacccagggctgctgctcatcctgggcaagctgatcctgctgcaccacaagcacccagaacggaagcaggcaccactaacttatgaaaaggaggaggaacaggaccaaggggtgagctgcaacaaagtggagtggtggtgggactgcttggagatgctccgggaaaacaccttggttacactcgccaacatctcggggcagttggacctatctccataccccgagagcatttgcctgcctgtcctggacggactcctacactgggcagtttgcccttcagctgaagcccaggaccccttttccaccctgggccccaatgccgtcctttccccgcagagactggtcttggaaaccctcagcaaactcagcatccaggacaacaatgtggacctgattctggccacaccccccttcagccgcctggagaagttgtatagcactatggtgcgcttcctcagtgaccgaaagaacccggtgtgccgggagatggctgtggtactgctggccaacctggctcagggggacagcctggcagctcgtgccattgcagtgcagaagggcagtatcggcaacctcctgggcttcctagaggacagccttgccgccacacagttccagcagagccaggccagcctcctccacatgcagaacccaccctttgagccaactagtgtggacatgatgcggcgggctgcccgcgcgctgcttgccttggccaaggtggacgagaaccactcagagtttactctgtacgaatcacggctgttggacatctcggtatcaccgttgatgaactcattggtttcacaagtcatttgtgatgtactgtttttgattggccagtcatgacagccgtgggacacctcccccccccgtgtgtgtgtgcgtgtgtggagaacttagaaactgactgttgccctttatttatgcaaaaccacctcagaatccagtttaccctgtgctgtccagcttctcccttgggaaaaagtctctcctgtttctctctcctccttccacctcccctccctccatcacctcacgcctttctgttccttgtcctcaccttactcccctcaggaccctaccccaccctctttgaaaagacaaagctctgcctacatagaagactttttttattttaaccaaagttactgttgtttacagtgagtttggggaaaaaaaataaaataaaaatggctttcccagtccttgcatcaacgggatgccacatttcataactgtttttaatggtaaaaaaaaaaaaaaaaaatacaaaaaaaaattctgaaggacaaaaaaggtgactgctgaactgtgtgtggtttattgttgtacattcacaatcttgcaggagccaagaagttcgcagttgtgaacagaccctgttcactggagaggcctgtgcagtagagtgtagaccctttcatgtactgtactgtacacctgatactgtaaacatactgtaataataatgtctcacatggaaacagaaaacgctgggtcagcagcaagctgtagtttttaaaaatgtttttagttaaacgttgaggagaaaaaaaaaaaaggcttttcccccaaagtatcatgtgtgaacctacaacaccctgacctctttctctcctccttgattgtatgaataaccctgagatcacctcttagaactggttttaacctttagctgcagcggctacgctgccacgtgtgtatatatatgacgttgtacattgcacatacccttggatccccacagtttggtcctcctcccagctacccctttatagtatgacgagttaacaagttggtgacctgcacaaagcgagacacagctatttaatctcttgccagatatcgcccctcttggtgcgatgctgtacaggtctctgtaaaaagtccttgctgtctcagcagccaatcaacttatagtttatttttttctgggtttttgttttgttttgttttctttctaatcgaggtgtgaaaaagttctaggttcagttgaagttctgatgaagaaacacaattgagattttttcagtgataaaatctgcatatttgtatttcaacaatgtagctaaaacttgatgtaaattcctcctttttttccttttttggcttaatgaatatcatttattcagtatgaaatctttatactatatgttccacgtgttaagaataaatgtacattaaatcttggtaagacttt

SEQ ID NO: 24 - DNA, 8585 bp, Homo sapiens
cagaaagcggagagtcacagcggggccaggccctggggagcggagcctccaccgcccccctcattcccaggcaagggcttggggggaatgagccgggagagccgggtcccgagcctacagagccgggagcagctgagccgccggcgcctcggccgccgccgccgcctcctcctcctccgccgccgccagcccggagcctgagccggcggggcgggggggagaggagcgagcgcagcgcagcagcggagccccgcgaggcccgcccgggcgggtggggagggcagcccgggggactgggccccggggcggggtgggagggggggagaagacgaagacagggccgggtctctccgcggacgagacagcggggatcatggccgcgcaggtcgcccccgccgccgccagcagcctgggcaacccgccgccgccgccgccctcggagctgaagaaagccgagcagcagcagcgggaggaggcggggggcgaggcggcggcggcggcagcggccgagcgcggggaaatgaaggcagccgccgggcaggaaagcgagggccccgccgtggggccgccgcagccgctgggaaaggagctgcaggacggggccgagagcaatgggggtggcggcggcggcggagccggcagcggcggcgggcccggcgcggagccggacctgaagaactcgaacgggaacgcgggccctaggcccgccctgaacaataacctcacggagccgcccggcggcggcggtggcggcagcagcgatggggtgggggcgcctcctcactcagccgcggccgccttgccgcccccagcctacggcttcgggcaaccctacggccggagcccgtctgccgtcgccgccgccgcggccgccgtcttccaccaacaacatggcggacaacaaagccctggcctggcagcgctgcagagcggcggcggcgggggcctggagccctacgcggggccccagcagaactctcacgaccacggcttccccaaccaccagtacaactcctactaccccaaccgcagcgcctaccccccgcccgccccggcctacgcgctgagctccccgagaggtggcactccgggctccggcgcggcggcggctgccggctccaagccgcctccctcctccagcgcctccgcctcctcgtcgtcttcgtccttcgctcagcagcgcttcggggccatggggggaggcggcccctccgcggccggcgggggaactccccagcccaccgccacccccaccctcaaccaactgctcacgtcgcccagctcggcccggggctaccagggctaccccgggggcgactacagtggcgggccccaggacgggggcgccggcaagggcccggcggacatggcctcgcagtgttggggggctgcggcggcggcagctgcggcggcggccgcctcgggaggggcccaacaaaggagccaccacgcgcccatgagccccgggagcagcggcggcggggggcagccgctcgcccggacccctcagccatccagtccaatggatcagatgggcaagatgagacctcagccatatggcgggactaacccatactcgcagcaacagggacctccgtcaggaccgcagcaaggacatgggtacccagggcagccatacgggtcccagaccccgcagcggtacccgatgaccatgcagggccgggcgcagagtgccatgggcggcctctcttatacacagcagattcctccttatggacaacaaggccccagcgggtatggtcaacagggccagactccatattacaaccagcaaagtcctcaccctcagcagcagcagccaccctactcccagcaaccaccgtcccagacccctcatgcccaaccttcgtatcagcagcagccacagtctcaaccaccacagctccagtcctctcagcctccatactcccagcagccatcccagcctccacatcagcagtccccggctccatacccctcccagcagtcgacgacacagcagcacccccagagccagcccccctactcacagccacaggctcagtctccttaacagcagcagcaacctcagcagccagcaccctcgacgctctcccagcaggctgcgtatcctcagccccagtctcagcagtcccagcaaactgcctattcccagcagcgcttccctccaccgcaggagctatctcaagattcatttgggtctcaggcatcctcagccccctcaatgacctccagtaagggagggcaagaagatatgaacctgagccttcagtcaagaccctccagcttgcctgatctatctggttcaatagatgacctccccatggggacagaaggagctctgagtcctggagtgagcacatcagggatttccagcagccaaggagagcagagtaatccagctcagtctcctttctctcctcatacctcccctcacctgcctggcatccgaggcccttccccgtcccctgttggctctcccgccagtgttgctcagtctcgctcaggaccactctcgcctgctgcagtgccaggcaaccagatgccacctcggccacccagtggccagtcggacagcatcatgcatccttccatgaaccaatcaagcattgcccaagatcgaggttatatgcagaggaacccccagatgccccagtacagttccccccagcccggctcagccttatctccgcgtcagccttccggaggacagatacacacaggcatgggctcctaccagcagaactccatggggagctatggtccccaggggggtcagtatggcccacaaggtggctaccccaggcagccaaactataatgccttgcccaatgccaactaccccagtgcaggcatggctggaggcataaaccccatgggtgccggaggtcaaatgcatggacagcctggcatcccaccttatggcacactccctccagggaggatgagtcacgcctccatgggcaaccggccttatggccctaacatggccaatatgccacctcaggttgggtcagggatgtgtcccccaccagggggcatgaaccggaaaacccaagaaactgctgtcgccatgcatgttgctgccaactctatccaaaacaggccgccaggctaccccaatatgaatcaagggggcatgatgggaactggacctccttatggacaagggattaatagtatggctggcatgatcaaccctcagggacccccatattccatgggtggaaccatggccaacaattctgcagggatggcagccagcccagagatgatgggccttggggatgtaaagttaactccagccaccaaaatgaacaacaaggcagatgggacacccaagacagaatccaaatccaagaaatccagttcttctactacaaccaatgagaagatcaccaagttgtatgagctgggtggtgagcctgagaggaagatgtgggtggaccgttatctggccttcactgaggagaaggccatgggcatgacaaatctgcctgctgtgggtaggaaacctctggacctctatcgcctctatgtgtctgtgaaggagattggtggattgactcaggtcaacaagaacaaaaaatggcgggaacttgcaaccaacctcaatgtgggcacatcaagcagtgctgccagctccttgaaaaagcagtatatccagtgtctctatgcctttgaatgcaagattgaacggggagaagaccctcccccagacatctttgcagctgctgattccaagaagtcccagcccaagatccagcctccctctcctgcgggatcaggatctatgcaggggccccagactccccagtcaaccagcagttccatggcagaaggaggagacttaaagccaccaactccagcatccacaccacacagtcagatccccccattgccaggcatgagcaggagcaattcagttgggatccaggatgcctttaatgatggaagtgactccacattccagaagcggaattccatgactccaaaccctgggtatcagcccagtatgaatacctctgacatgatggggcgcatgtcctatgagccaaataaggatccttatggcagcatgaggaaagctccagggagtgatcccttcatgtcctcagggcagggccccaacggcgggatgggtgacccctacagtcgtgctgccggccctgggctaggaaatgtggcgatgggaccacgacagcactatccctatggaggtccttatgacagagtgaggacggagcctggaatagggcctgagggaaacatgagcactggggccccacagccgaatctcatgccttccaacccagactcggggatgtattctcctagccgctaccccccgcagcagcagcagcagcagcagcaacgacatgattcctatggcaatcagttctccacccaaggcaccccttctggcagccccttccccagccagcagactacaatgtatcaacagcaacagcagaattacaagcggccaatggatggcacatatggccctcctgccaagcggcacgaaggggagatgtacagcgtgccatacagcactgggcaggggcagcctcagcagcagcagttgcccccagcccagccccagcctgccagccagcaacaagctgcccagccttcccctcagcaagatgtatacaaccagtatggcaatgcctatcctgccactgccacagctgctactgagcgccgaccagcaggcggcccccagaaccaatttccattccagtttggccgagaccgtgtctctgcaccccctggcaccaatgcccagcaaaacatgccaccacaaatgatgggcggccccatacaggcatcagctgaggttgctcagcaaggcaccatgtggcaggggcgtaatgacatgacctataattatgccaacaggcagagcacgggctctgccccccagggccccgcctatcatggcgtgaaccgaacagatgaaatgctgcacacagatcagagggccaaccacgaaggctcgtggccttcccatggcacacgccagcccccatatggtccctctgcccctgtgccccccatgacaaggccccctccatctaactaccagcccccaccaagcatgcagaatcacattcctcaggtatccagccctgctcccctgccccggccaatggagaaccgcacctctcctagcaagtctccattcctgcactctgggatgaaaatgcagaaggcaggtcccccagtacctgcctcgcacatagcacctgcccctgtgcagccccccatgattcggcgggatatcaccttcccacctggctctgttgaagccacacagcctgtgttgaagcagaggaggcggctcacaatgaaagacattggaaccccggaggcatggcgggtaatgatgtccctcaagtctggtctcctggcagagagcacatgggcattagataccatcaacatcctgctgtatgatgacaacagcatcatgaccttcaacctcagtcagctcccagggttgctagagctccttgtagaatatttccgacgatgcctgattgagatctttggcattttaaaggagtatgaggtgggtgacccaggacagagaacgctactggatcctgggaggttcagcaaggtgtctagtccagctcccatggagggtggggaagaagaagaagaacttctaggtcctaaactagaagaggaagaagaagaggaagtagttgaaaatgatgaggagatagccttttcaggcaaggacaagccagcttcagagaatagtgaggagaagctgatcagtaagtttgacaagcttccagtaaagatcgtacagaagaatgatccatttgtggtggactgctcagataagcttgggcgtgtgcaggagtttgacagtggcctgctgcactggcggattggtgggggggacaccactgagcatatccagacccacttcgagagcaagacagagctgctgccttcccggcctcacgcaccctgcccaccagcccctcggaagcatgtgacaacagcagagggtacaccagggacaacagaccaggaggggcccccacctgatggacctccagaaaaacggatcacagccactatggatgacatgttgtctactcggtctagcaccttgaccgaggatggagctaagagttcagaggccatcaaggagagcagcaagtttccatttggcattagcccagcacagagccaccggaacatcaagatcctagaggacgaaccccacagtaaggatgagaccccactgtgtacccttctggactggcaggattctcttgccaagcgctgcgtctgtgtgtccaataccattcgaagcctgtcatttgtgccaggcaatgactttgagatgtccaaacacccagggctgctgctcatcctgggcaagctgatcctgctgcaccacaagcacccagaacggaagcaggcaccactaacttatgaaaaggaggaggaacaggaccaaggggtgagctgcaacaaagtggagtggtggtgggactgcttggagatgctccgggaaaacaccttggttacactcgccaacatctcggggcagttggacctatctccataccccgagagcatttgcctgcctgtcctggacggactcctacactgggcagtttgcccttcagctgaagcccaggaccccttttccaccctgggccccaatgccgtcctttccccgcagagactggtcttggaaaccctcagcaaactcagcatccaggacaacaatgtggacctgattctggccacaccccccttcagccgcctggagaagttgtatagcactatggtgcgcttcctcagtgaccgaaagaacccggtgtgccgggagatggctgtggtactgctggccaacctggctcagggggacagcctggcagctcgtgccattgcagtgcagaagggcagtatcggcaacctcctgggcttcctagaggacagccttgccgccacacagttccagcagagccaggccagcctcctccacatgcagaacccaccctttgagccaactagtgtggacatgatgcggcgggctgcccgcgcgctgcttgccttggccaaggtggacgagaaccactcagagtttactctgtacgaatcacggctgttggacatctcggtatcaccgttgatgaactcattggtttcacaagtcatttgtgatgtactgtttttgattggccagtcatgacagccgtgggacacctcccccccccgtgtgtgtgtgcgtgtgtggagaacttagaaactgactgttgccctttatttatgcaaaaccacctcagaatccagtttaccctgtgctgtccagcttctcccttgggaaaaagtctctcctgtttctctctcctccttccacctcccctccctccatcacctcacgcctttctgttccttgtcctcaccttactcccctcaggaccctaccccaccctctttgaaaagacaaagctctgcctacatagaagactttttttattttaaccaaagttactgttgtttacagtgagtttggggaaaaaaaataaaataaaaatggctttcccagtccttgcatcaacgggatgccacatttcataactgtttttaatggtaaaaaaaaaaaaaaaaaatacaaaaaaaaattctgaaggacaaaaaaggtgactgctgaactgtgtgtggtttattgttgtacattcacaatcttgcaggagccaagaagttcgcagttgtgaacagaccctgttcactggagaggcctgtgcagtagagtgtagaccctttcatgtactgtactgtacacctgatactgtaaacatactgtaataataatgtctcacatggaaacagaaaacgctgggtcagcagcaagctgtagtttttaaaaatgtttttagttaaacgttgaggagaaaaaaaaaaaaggcttttcccccaaagtatcatgtgtgaacctacaacaccctgacctctttctctcctccttgattgtatgaataaccctgagatcacctcttagaactggttttaacctttagctgcagcggctacgctgccacgtgtgtatatatatgacgttgtacattgcacatacccttggatccccacagtttggtcctcctcccagctacccctttatagtatgacgagttaacaagttggtgacctgcacaaagcgagacacagctatttaatctcttgccagatatcgcccctcttggtgcgatgctgtacaggtctctgtaaaaagtccttgctgtctcagcagccaatcaacttatagtttatttttttctgggtttttgttttgttttgttttctttctaatcgaggtgtgaaaaagttctaggttcagttgaagttctgatgaagaaacacaattgagattttttcagtgataaaatctgcatatttgtatttcaacaatgtagctaaaacttgatgtaaattcctcctttttttccttttttggcttaatgaatatcatttattcagtatgaaatctttatactatatgttccacgtgttaagaataaatgtacattaaatcttggtaagacttt

SEQ ID NO: 25 - DNA, 8585 bp, Homo sapiens
cagaaagcggagagtcacagcggggccaggccctggggagcggagcctccaccgcccccctcattcccaggcaagggcttggggggaatgagccgggagagccgggtcccgagcctacagagccgggagcagctgagccgccggcgcctcggccgccgccgccgcctcctcctcctccgccgccgccagcccggagcctgagccggcggggcgggggggagaggagcgagcgcagcgcagcagcggagccccgcgaggcccgcccgggcgggtggggagggcagcccgggggactgggccccggggcggggtgggagggggggagaagacgaagacagggccgggtctctccgcggacgagacagcggggatcatggccgcgcaggtcgcccccgccgccgccagcagcctgggcaacccgccgccgccgccgccctcggagctgaagaaagccgagcagcagcagcgggaggaggcggggggcgaggcggcggcggcggcagcggccgagcgcggggaaatgaaggcagccgccgggcaggaaagcgagggccccgccgtggggccgccgcagccgctgggaaaggagctgcaggacggggccgagagcaatgggggtggcggcggcggcggagccggcagcggcggcgggcccggcgcggagccggacctgaagaactcgaacgggaacgcgggccctaggcccgccctgaacaataacctcacggagccgcccggcggcggcggtggcggcagcagcgatggggtgggggcgcctcctcactcagccgcggccgccttgccgcccccagcctacggcttcgggcaaccctacggccggagcccgtctgccgtcgccgccgccgcggccgccgtcttccaccaacaacatggcggacaacaaagccctggcctggcagcgctgcagagcggcggcggcgggggcctggagccctacgcggggccccagcagaactctcacgaccacggcttccccaaccaccagtacaactcctactaccccaaccgcagcgcctaccccccgcccgccccggcctacgcgctgagctccccgagaggtggcactccgggctccggcgcggcggcggctgccggctccaagccgcctccctcctccagcgcctccgcctcctcgtcgtcttcgtccttcgctcagcagcgcttcggggccatggggggaggcggcccctccgcggccggcgggggaactccccagcccaccgccacccccaccctcaaccaactgctcacgtcgcccagctcggcccggggctaccagggctaccccgggggcgactacagtggcgggccccaggacgggggcgccggcaagggcccggcggacatggcctcgcagtgttggggggctgcggcggcggcagctgcggcggcggccgcctcgggaggggcccaacaaaggagccaccacgcgcccatgagccccgggagcagcggcggcggggggcagccgctcgcccggacccctcagccatccagtccaatggatcagatgggcaagatgagacctcagccatatggcgggactaacccatactcgcagcaacagggacctccgtcaggaccgcagcaaggacatgggtacccagggcagccatacgggtcccagaccccgcagcggtacccgatgaccatgcagggccgggcgcagagtgccatgggcggcctctcttatacacagcagattcctccttatggacaacaaggccccagcgggtatggtcaacagggccagactccatattacaaccagcaaagtcctcaccctcagcagcagcagccaccctactcccagcaaccaccgtcccagacccctcatgcccaaccttcgtatcagcagcagccacagtctcaaccaccacagctccagtcctctcagcctccatactcccagcagccatcccagcctccacatcagcagtccccggctccatacccctcccagcagtcgacgacacagcagcacccccagagccagcccccctactcacagccacaggctcagtctccttaccagcagcagcaacctcagcagccagcaccctcgacgctctcccagcaggctgcgtatcctcagccccagtctcagcagtcccagcaaactgcctattcccagcagcgcttccctccaccgcaggagctatctcaagattcatttgggtctcaggcatcctcagccccctcaatgacctccagtaagggagggcaagaagatatgaacctgagccttcagtcaagaccctccagcttgcctgatctatctggttcaatagatgacctccccatggggacagaaggagctctgagtcctggagtgagcacatcagggatttccagcagccaaggagagcagagtaatccagctcagtctcctttctctcctcatacctcccctcacctgcctggcatccgaggcccttccccgtcccctgttggctctcccgccagtgttgctcagtctcgctcaggaccactctcgcctgctgcagtgccaggcaaccagatgccacctcggccacccagtggccagtcggacagcatcatgcatccttccatgaaccaatcaagcattgcccaagatcgaggttatatgcagaggaacccccagatgccccagtacagttccccccagcccggctcagccttatctccgcgtcagccttccggaggacagatacacacaggcatgggctcctaccagcagaactccatggggagctatggtccccaggggggtcagtatggcccacaaggtggctaccccaggcagccaaactataatgccttgcccaatgccaactaccccagtgcaggcatggctggaggcataaaccccatgggtgccggaggtcaaatgcatggacagcctggcatcccaccttatggcacactccctccagggaggatgagtcacgcctccatgggcaaccggccttatggccctaacatggccaatatgccacctcaggttgggtcagggatgtgtcccccaccagggggcatgaaccggaaaacccaagaaactgctgtcgccatgcatgttgctgccaactctatccaaaacaggccgccaggctaccccaatatgaatcaagggggcatgatgggaactggacctccttatggacaagggattaatagtatggctggcatgatcaaccctcagggacccccatattccatgggtggaaccatggccaacaattctgcagggatggcagccagcccagagatgatgggccttggggatgtaaagttaactccagccaccaaaatgaacaacaaggcagatgggacacccaagacagaatccaaatccaagaaatccagttcttctactacaaccaatgagaagatcaccaagttgtatgagctgggtggtgagcctgagaggaagatgtgggtggaccgttatctggccttcactgaggagaaggccatgggcatgacaaatctgcctgctgtgggtaggaaacctctggacctctatcgcctctatgtgtctgtgaaggagattggtggattgactcaggtcaacaagaacaaaaaatggcgggaacttgcaaccaacctcaatgtgggcacatcaagcagtgctgccagctccttgaaaaagcagtatatccagtgtctctatgcctttgaatgcaagattgaacggggagaagaccctcccccagacatctttgcagctgctgattccaagaagtcccagcccaagatccagcctccctctcctgcgggatcaggatctatgcaggggccccagactccccagtcaaccagcagttccatggcagaaggaggagacttaaagccaccaactccagcatccacaccacacagtcagatccccccattgccaggcatgagcaggagcaattcagttgggatccaggatgcctttaatgatggaagtgactccacattccagaagcggaattccatgactccaaaccctgggtatcagcccagtatgaatacctctgacatgatggggcgcatgtcctatgagccaaataaggatccttatggcagcatgaggaaagctccagggagtgatcccttcatgtcctcagggcagggccccaacggcgggatgggtgacccctacagtcgtgctgccggccctgggctaggaaatgtggcgatgggaccacgacagcactatccctatggaggtccttatgacagagtgaggacggagcctggaatagggcctgagggaaacatgagcactggggccccacagccgaatctcatgccttccaacccagactcggggatgtattctcctagccgctaccccccgcagcagcagcagcagcagcagcaacgacatgattcctatggcaatcagttctccacccaaggcaccccttctggcagccccttccccagccagcagactacaatgtatcaacagcaacagcagaattacaagcggccaatggatggcacatatggccctcctgccaagcggcacgaaggggagatgtacagcgtgccatacagcactgggcaggggcagcctcagcagcagcagttgcccccagcccagccccagcctgccagccagcaacaagctgcccagccttcccctcagcaagatgtatacaaccagtatggcaatgcctatcctgccactgccacagctgctactgagcgccgaccagcaggcggcccccagaaccaatttccattccagtttggccgagaccgtgtctctgcaccccctggcaccaatgcccagcaaaacatgccaccacaaatgatgggcggccccatacaggcatcagctgaggttgctcagcaaggcaccatgtggcaggggcgtaatgacatgacctataattatgccaacaggcagagcacgggctctgccccccagggccccgcctatcatggcgtgaaccgaacagatgaaatgctgcacacagatcagagggccaaccacgaaggctcgtggccttcccatggcacacgccagcccccatatggtccctctgcccctgtgccccccatgacaaggccccctccatctaactaccagcccccaccaagcatgcagaatcacattcctcaggtatccagccctgctcccctgccccggccaatggagaaccgcacctctcctagcaagtctccattcctgcactctgggatgaaaatgcagaaggcaggtcccccagtacctgcctcgcacatagcacctgcccctgtgcagccccccatgattcggcgggatatcaccttcccacctggctctgttgaagccacacagcctgtgttgaagcagaggaggcggctcacaatgaaagacattggaaccccggaggcatggcgggtaatgatgtccctcaagtctggtctcctggcagagagcacatgggcattagataccatcaacatcctgctgtatgatgacaacagcatcatgaccttcaacctcagtcagctcccagggttgctagagctccttgtagaatatttccgacgatgcctgattgagatctttggcattttaaaggagtatgaggtgggtgacccaggacagagaacgctactggatcctgggaggttcagcaaggtgtctagtccagctcccatggagggtggggaagaagaagaagaacttctaggtcctaaactagaagaggaagaagaagaggaagtagttgaaaatgatgaggagatagccttttcaggcaaggacaagccagcttcagagaatagtgaggagaagctgatcagtaagtttgacaagcttccagtaaagatcgtacagaagaatgatccatttgtggtggactgctcagataagcttgggcgtgtgcaggagtttgacagtggcctgctgcactggcggattggtgggggggacaccactgagcatatctagacccacttcgagagcaagacagagctgctgccttcccggcctcacgcaccctgcccaccagcccctcggaagcatgtgacaacagcagagggtacaccagggacaacagaccaggaggggcccccacctgatggacctccagaaaaacggatcacagccactatggatgacatgttgtctactcggtctagcaccttgaccgaggatggagctaagagttcagaggccatcaaggagagcagcaagtttccatttggcattagcccagcacagagccaccggaacatcaagatcctagaggacgaaccccacagtaaggatgagaccccactgtgtacccttctggactggcaggattctcttgccaagcgctgcgtctgtgtgtccaataccattcgaagcctgtcatttgtgccaggcaatgactttgagatgtccaaacacccagggctgctgctcatcctgggcaagctgatcctgctgcaccacaagcacccagaacggaagcaggcaccactaacttatgaaaaggaggaggaacaggaccaaggggtgagctgcaacaaagtggagtggtggtgggactgcttggagatgctccgggaaaacaccttggttacactcgccaacatctcggggcagttggacctatctccataccccgagagcatttgcctgcctgtcctggacggactcctacactgggcagtttgcccttcagctgaagcccaggaccccttttccaccctgggccccaatgccgtcctttccccgcagagactggtcttggaaaccctcagcaaactcagcatccaggacaacaatgtggacctgattctggccacaccccccttcagccgcctggagaagttgtatagcactatggtgcgcttcctcagtgaccgaaagaacccggtgtgccgggagatggctgtggtactgctggccaacctggctcagggggacagcctggcagctcgtgccattgcagtgcagaagggcagtatcggcaacctcctgggcttcctagaggacagccttgccgccacacagttccagcagagccaggccagcctcctccacatgcagaacccaccctttgagccaactagtgtggacatgatgcggcgggctgcccgcgcgctgcttgccttggccaaggtggacgagaaccactcagagtttactctgtacgaatcacggctgttggacatctcggtatcaccgttgatgaactcattggtttcacaagtcatttgtgatgtactgtttttgattggccagtcatgacagccgtgggacacctcccccccccgtgtgtgtgtgcgtgtgtggagaacttagaaactgactgttgccctttatttatgcaaaaccacctcagaatccagtttaccctgtgctgtccagcttctcccttgggaaaaagtctctcctgtttctctctcctccttccacctcccctccctccatcacctcacgcctttctgttccttgtcctcaccttactcccctcaggaccctaccccaccctctttgaaaagacaaagctctgcctacatagaagactttttttattttaaccaaagttactgttgtttacagtgagtttggggaaaaaaaataaaataaaaatggctttcccagtccttgcatcaacgggatgccacatttcataactgtttttaatggtaaaaaaaaaaaaaaaaaatacaaaaaaaaattctgaaggacaaaaaaggtgactgctgaactgtgtgtggtttattgttgtacattcacaatcttgcaggagccaagaagttcgcagttgtgaacagaccctgttcactggagaggcctgtgcagtagagtgtagaccctttcatgtactgtactgtacacctgatactgtaaacatactgtaataataatgtctcacatggaaacagaaaacgctgggtcagcagcaagctgtagtttttaaaaatgtttttagttaaacgttgaggagaaaaaaaaaaaaggcttttcccccaaagtatcatgtgtgaacctacaacaccctgacctctttctctcctccttgattgtatgaataaccctgagatcacctcttagaactggttttaacctttagctgcagcggctacgctgccacgtgtgtatatatatgacgttgtacattgcacatacccttggatccccacagtttggtcctcctcccagctacccctttatagtatgacgagttaacaagttggtgacctgcacaaagcgagacacagctatttaatctcttgccagatatcgcccctcttggtgcgatgctgtacaggtctctgtaaaaagtccttgctgtctcagcagccaatcaacttatagtttatttttttctgggtttttgttttgttttgttttctttctaatcgaggtgtgaaaaagttctaggttcagttgaagttctgatgaagaaacacaattgagattttttcagtgataaaatctgcatatttgtatttcaacaatgtagctaaaacttgatgtaaattcctcctttttttccttttttggcttaatgaatatcatttattcagtatgaaatctttatactatatgttccacgtgttaagaataaatgtacattaaatcttggtaagacttt

SEQ ID NO: 26 - DNA, 8574 bp, Homo sapiens
cagaaagcggagagtcacagcggggccaggccctggggagcggagcctccaccgcccccctcattcccaggcaagggcttggggggaatgagccgggagagccgggtcccgagcctacagagccgggagcagctgagccgccggcgcctcggccgccgccgccgcctcctcctcctccgccgccgccagcccggagcctgagccggcggggcgggggggagaggagcgagcgcagcgcagcagcggagccccgcgaggcccgcccgggcgggtggggagggcagcccgggggactgggccccggggcggggtgggagggggggagaagacgaagacagggccgggtctctccgcggacgagacagcggggatcatggccgcgcaggtcgcccccgccgccgccagcagcctgggcaacccgccgccgccgccgccctcggagctgaagaaagccgagcagcagcagcgggaggaggcggggggcgaggcggcggcggcggcagcggccgagcgcggggaaatgaaggcagccgccgggcaggaaagcgagggccccgccgtggggccgccgcagccgctgggaaaggagctgcaggacggggccgagagcaatgggggtggcggcggcggcggagccggcagcggcggcgggcccggccctgaagaactcgaacgggaacgcgggccctaggcccgccctgaacaataacctcacggagccgcccggcggcggcggtggcggcagcagcgatggggtgggggcgcctcctcactcagccgcggccgccttgccgcccccagcctacggcttcgggcaaccctacggccggagcccgtctgccgtcgccgccgccgcggccgccgtcttccaccaacaacatggcggacaacaaagccctggcctggcagcgctgcagagcggcggcggcgggggcctggagccctacgcggggccccagcagaactctcacgaccacggcttccccaaccaccagtacaactcctactaccccaaccgcagcgcctaccccccgcccgccccggcctacgcgctgagctccccgagaggtggcactccgggctccggcgcggcggcggctgccggctccaagccgcctccctcctccagcgcctccgcctcctcgtcgtcttcgtccttcgctcagcagcgcttcggggccatggggggaggcggcccctccgcggccggcgggggaactccccagcccaccgccacccccaccctcaaccaactgctcacgtcgcccagctcggcccggggctaccagggctaccccgggggcgactacagtggcgggccccaggacgggggcgccggcaagggcccggcggacatggcctcgcagtgttggggggctgcggcggcggcagctgcggcggcggccgcctcgggaggggcccaacaaaggagccaccacgcgcccatgagccccgggagcagcggcggcggggggcagccgctcgcccggacccctcagccatccagtccaatggatcagatgggcaagatgagacctcagccatatggcgggactaacccatactcgcagcaacagggacctccgtcaggaccgcagcaaggacatgggtacccagggcagccatacgggtcccagaccccgcagcggtacccgatgaccatgcagggccgggcgcagagtgccatgggcggcctctcttatacacagcagattcctccttatggacaacaaggccccagcgggtatggtcaacagggccagactccatattacaaccagcaaagtcctcaccctcagcagcagcagccaccctactcccagcaaccaccgtcccagacccctcatgcccaaccttcgtatcagcagcagccacagtctcaaccaccacagctccagtcctctcagcctccatactcccagcagccatcccagcctccacatcagcagtccccggctccatacccctcccagcagtcgacgacacagcagcacccccagagccagcccccctactcacagccacaggctcagtctccttaccagcagcagcaacctcagcagccagcaccctcgacgctctcccagcaggctgcgtatcctcagccccagtctcagcagtcccagcaaactgcctattcccagcagcgcttccctccaccgcaggagctatctcaagattcatttgggtctcaggcatcctcagccccctcaatgacctccagtaagggagggcaagaagatatgaacctgagccttcagtcaagaccctccagcttgcctgatctatctggttcaatagatgacctccccatggggacagaaggagctctgagtcctggagtgagcacatcagggatttccagcagccaaggagagcagagtaatccagctcagtctcctttctctcctcatacctcccctcacctgcctggcatccgaggcccttccccgtcccctgttggctctcccgccagtgttgctcagtctcgctcaggaccactctcgcctgctgcagtgccaggcaaccagatgccacctcggccacccagtggccagtcggacagcatcatgcatccttccatgaaccaatcaagcattgcccaagatcgaggttatatgcagaggaacccccagatgccccagtacagttccccccagcccggctcagccttatctccgcgtcagccttccggaggacagatacacacaggcatgggctcctaccagcagaactccatggggagctatggtccccaggggggtcagtatggcccacaaggtggctaccccaggcagccaaactataatgccttgcccaatgccaactaccccagtgcaggcatggctggaggcataaaccccatgggtgccggaggtcaaatgcatggacagcctggcatcccaccttatggcacactccctccagggaggatgagtcacgcctccatgggcaaccggccttatggccctaacatggccaatatgccacctcaggttgggtcagggatgtgtcccccaccagggggcatgaaccggaaaacccaagaaactgctgtcgccatgcatgttgctgccaactctatccaaaacaggccgccaggctaccccaatatgaatcaagggggcatgatgggaactggacctccttatggacaagggattaatagtatggctggcatgatcaaccctcagggacccccatattccatgggtggaaccatggccaacaattctgcagggatggcagccagcccagagatgatgggccttggggatgtaaagttaactccagccaccaaaatgaacaacaaggcagatgggacacccaagacagaatccaaatccaagaaatccagttcttctactacaaccaatgagaagatcaccaagttgtatgagctgggtggtgagcctgagaggaagatgtgggtggaccgttatctggccttcactgaggagaaggccatgggcatgacaaatctgcctgctgtgggtaggaaacctctggacctctatcgcctctatgtgtctgtgaaggagattggtggattgactcaggtcaacaagaacaaaaaatggcgggaacttgcaaccaacctcaatgtgggcacatcaagcagtgctgccagctccttgaaaaagcagtatatccagtgtctctatgcctttgaatgcaagattgaacggggagaagaccctcccccagacatctttgcagctgctgattccaagaagtcccagcccaagatccagcctccctctcctgcgggatcaggatctatgcaggggccccagactccccagtcaaccagcagttccatggcagaaggaggagacttaaagccaccaactccagcatccacaccacacagtcagatccccccattgccaggcatgagcaggagcaattcagttgggatccaggatgcctttaatgatggaagtgactccacattccagaagcggaattccatgactccaaaccctgggtatcagcccagtatgaatacctctgacatgatggggcgcatgtcctatgagccaaataaggatccttatggcagcatgaggaaagctccagggagtgatcccttcatgtcctcagggcagggccccaacggcgggatgggtgacccctacagtcgtgctgccggccctgggctaggaaatgtggcgatgggaccacgacagcactatccctatggaggtccttatgacagagtgaggacggagcctggaatagggcctgagggaaacatgagcactggggccccacagccgaatctcatgccttccaacccagactcggggatgtattctcctagccgctaccccccgcagcagcagcagcagcagcagcaacgacatgattcctatggcaatcagttctccacccaaggcaccccttctggcagccccttccccagccagcagactacaatgtatcaacagcaacagcagaattacaagcggccaatggatggcacatatggccctcctgccaagcggcacgaaggggagatgtacagcgtgccatacagcactgggcaggggcagcctcagcagcagcagttgcccccagcccagccccagcctgccagccagcaacaagctgcccagccttcccctcagcaagatgtatacaaccagtatggcaatgcctatcctgccactgccacagctgctactgagcgccgaccagcaggcggcccccagaaccaatttccattccagtttggccgagaccgtgtctctgcaccccctggcaccaatgcccagcaaaacatgccaccacaaatgatgggcggccccatacaggcatcagctgaggttgctcagcaaggcaccatgtggcaggggcgtaatgacatgacctataattatgccaacaggcagagcacgggctctgccccccagggccccgcctatcatggcgtgaaccgaacagatgaaatgctgcacacagatcagagggccaaccacgaaggctcgtggccttcccatggcacacgccagcccccatatggtccctctgcccctgtgccccccatgacaaggccccctccatctaactaccagcccccaccaagcatgcagaatcacattcctcaggtatccagccctgctcccctgccccggccaatggagaaccgcacctctcctagcaagtctccattcctgcactctgggatgaaaatgcagaaggcaggtcccccagtacctgcctcgcacatagcacctgcccctgtgcagccccccatgattcggcgggatatcaccttcccacctggctctgttgaagccacacagcctgtgttgaagcagaggaggcggctcacaatgaaagacattggaaccccggaggcatggcgggtaatgatgtccctcaagtctggtctcctggcagagagcacatgggcattagataccatcaacatcctgctgtatgatgacaacagcatcatgaccttcaacctcagtcagctcccagggttgctagagctccttgtagaatatttccgacgatgcctgattgagatctttggcattttaaaggagtatgaggtgggtgacccaggacagagaacgctactggatcctgggaggttcagcaaggtgtctagtccagctcccatggagggtggggaagaagaagaagaacttctaggtcctaaactagaagaggaagaagaagaggaagtagttgaaaatgatgaggagatagccttttcaggcaaggacaagccagcttcagagaatagtgaggagaagctgatcagtaagtttgacaagcttccagtaaagatcgtacagaagaatgatccatttgtggtggactgctcagataagcttgggcgtgtgcaggagtttgacagtggcctgctgcactggcggattggtgggggggacaccactgagcatatccagacccacttcgagagcaagacagagctgctgccttcccggcctcacgcaccctgcccaccagcccctcggaagcatgtgacaacagcagagggtacaccagggacaacagaccaggaggggcccccacctgatggacctccagaaaaacggatcacagccactatggatgacatgttgtctactcggtctagcaccttgaccgaggatggagctaagagttcagaggccatcaaggagagcagcaagtttccatttggcattagcccagcacagagccaccggaacatcaagatcctagaggacgaaccccacagtaaggatgagaccccactgtgtacccttctggactggcaggattctcttgccaagcgctgcgtctgtgtgtccaataccattcgaagcctgtcatttgtgccaggcaatgactttgagatgtccaaacacccagggctgctgctcatcctgggcaagctgatcctgctgcaccacaagcacccagaacggaagcaggcaccactaacttatgaaaaggaggaggaacaggaccaaggggtgagctgcaacaaagtggagtggtggtgggactgcttggagatgctccgggaaaacaccttggttacactcgccaacatctcggggcagttggacctatctccataccccgagagcatttgcctgcctgtcctggacggactcctacactgggcagtttgcccttcagctgaagcccaggaccccttttccaccctgggccccaatgccgtcctttccccgcagagactggtcttggaaaccctcagcaaactcagcatccaggacaacaatgtggacctgattctggccacaccccccttcagccgcctggagaagttgtatagcactatggtgcgcttcctcagtgaccgaaagaacccggtgtgccgggagatggctgtggtactgctggccaacctggctcagggggacagcctggcagctcgtgccattgcagtgcagaagggcagtatcggcaacctcctgggcttcctagaggacagccttgccgccacacagttccagcagagccaggccagcctcctccacatgcagaacccaccctttgagccaactagtgtggacatgatgcggcgggctgcccgcgcgctgcttgccttggccaaggtggacgagaaccactcagagtttactctgtacgaatcacggctgttggacatctcggtatcaccgttgatgaactcattggtttcacaagtcatttgtgatgtactgtttttgattggccagtcatgacagccgtgggacacctcccccccccgtgtgtgtgtgcgtgtgtggagaacttagaaactgactgttgccctttatttatgcaaaaccacctcagaatccagtttaccctgtgctgtccagcttctcccttgggaaaaagtctctcctgtttctctctcctccttccacctcccctccctccatcacctcacgcctttctgttccttgtcctcaccttactcccctcaggaccctaccccaccctctttgaaaagacaaagctctgcctacatagaagactttttttattttaaccaaagttactgttgtttacagtgagtttggggaaaaaaaataaaataaaaatggctttcccagtccttgcatcaacgggatgccacatttcataactgtttttaatggtaaaaaaaaaaaaaaaaaatacaaaaaaaaattctgaaggacaaaaaaggtgactgctgaactgtgtgtggtttattgttgtacattcacaatcttgcaggagccaagaagttcgcagttgtgaacagaccctgttcactggagaggcctgtgcagtagagtgtagaccctttcatgtactgtactgtacacctgatactgtaaacatactgtaataataatgtctcacatggaaacagaaaacgctgggtcagcagcaagctgtagtttttaaaaatgtttttagttaaacgttgaggagaaaaaaaaaaaaggcttttcccccaaagtatcatgtgtgaacctacaacaccctgacctctttctctcctccttgattgtatgaataaccctgagatcacctcttagaactggttttaacctttagctgcagcggctacgctgccacgtgtgtatatatatgacgttgtacattgcacatacccttggatccccacagtttggtcctcctcccagctacccctttatagtatgacgagttaacaagttggtgacctgcacaaagcgagacacagctatttaatctcttgccagatatcgcccctcttggtgcgatgctgtacaggtctctgtaaaaagtccttgctgtctcagcagccaatcaacttatagtttatttttttctgggtttttgttttgttttgttttctttctaatcgaggtgtgaaaaagttctaggttcagttgaagttctgatgaagaaacacaattgagattttttcagtgataaaatctgcatatttgtatttcaacaatgtagctaaaacttgatgtaaattcctcctttttttccttttttggcttaatgaatatcatttattcagtatgaaatctttatactatatgttccacgtgttaagaataaatgtacattaaatcttggtaagacttt

SEQ ID NO: 27 - DNA, 8585 bp, Homo sapiens
cagaaagcggagagtcacagcggggccaggccctggggagcggagcctccaccgcccccctcattcccaggcaagggcttggggggaatgagccgggagagccgggtcccgagcctacagagccgggagcagctgagccgccggcgcctcggccgccgccgccgcctcctcctcctccgccgccgccagcccggagcctgagccggcggggcgggggggagaggagcgagcgcagcgcagcagcggagccccgcgaggcccgcccgggcgggtggggagggcagcccgggggactgggccccggggcggggtgggagggggggagaagacgaagacagggccgggtctctccgcggacgagacagcggggatcatggccgcgcaggtcgcccccgccgccgccagcagcctgggcaacccgccgccgccgccgccctcggagctgaagaaagccgagcagcagcagcgggaggaggcggggggcgaggcggcggcggcggcagcggccgagcgcggggaaatgaaggcagccgccgggcaggaaagcgagggccccgccgtggggccgccgcagccgctgggaaaggagctgcaggacggggccgagagcaatgggggtggcggcggcggcggagccggcagcggcggcgggcccggcgcggagccggacctgaagaactcgaacgggaacgcgggccctaggcccgccctgaacaataacctcacggagccgcccggcggcggcggtggcggcagcagcgatggggtgggggcgcctcctcactcagccgcggccgccttgccgcccccagcctacggcttcgggcaaccctacggccggagcccgtctgccgtcgccgccgccgcggccgccgtcttccaccaacaacatggcggacaacaaagccctggcctggcagcgctgcagagcggcggcggcgggggcctggagccctacgcggggccccagcagaactctcacgaccacggcttccccaaccaccagtacaactcctactaccccaaccgcagcgcctaccccccgcccgccccggcctacgcgctgagctccccgagaggtggcactccgggctccggcgcggcggcggctgccggctccaagccgcctccctcctccagcgcctccgcctcctcgtcgtcttcgtccttcgctcagcagcgcttcggggccatggggggaggcggcccctccgcggccggcgggggaactccccagcccaccgccacccccaccctcaaccaactgctcacgtcgcccagctcggcccggggctaccagggctaccccgggggcgactacagtggcgggccccaggacgggggcgccggcaagggcccggcggacatggcctcgcagtgttggggggctgcggcggcggcagctgcggcggcggccgcctcgggaggggcccaacaaaggagccaccacgcgcccatgagccccgggagcagcggcggcggggggcagccgctcgcccggacccctcagccatccagtccaatggatcagatgggcaagatgagacctcagccataaggcgggactaacccatactcgcagcaacagggacctccgtcaggaccgcagcaaggacatgggtacccagggcagccatacgggtcccagaccccgcagcggtacccgatgaccatgcagggccgggcgcagagtgccatgggcggcctctcttatacacagcagattcctccttatggacaacaaggccccagcgggtatggtcaacagggccagactccatattacaaccagcaaagtcctcaccctcagcagcagcagccaccctactcccagcaaccaccgtcccagacccctcatgcccaaccttcgtatcagcagcagccacagtctcaaccaccacagctccagtcctctcagcctccatactcccagcagccatcccagcctccacatcagcagtccccggctccatacccctcccagcagtcgacgacacagcagcacccccagagccagcccccctactcacagccacaggctcagtctccttaccagcagcagcaacctcagcagccagcaccctcgacgctctcccagcaggctgcgtatcctcagccccagtctcagcagtcccagcaaactgcctattcccagcagcgcttccctccaccgcaggagctatctcaagattcatttgggtctcaggcatcctcagccccctcaatgacctccagtaagggagggcaagaagatatgaacctgagccttcagtcaagaccctccagcttgcctgatctatctggttcaatagatgacctccccatggggacagaaggagctctgagtcctggagtgagcacatcagggatttccagcagccaaggagagcagagtaatccagctcagtctcctttctctcctcatacctcccctcacctgcctggcatccgaggcccttccccgtcccctgttggctctcccgccagtgttgctcagtctcgctcaggaccactctcgcctgctgcagtgccaggcaaccagatgccacctcggccacccagtggccagtcggacagcatcatgcatccttccatgaaccaatcaagcattgcccaagatcgaggttatatgcagaggaacccccagatgccccagtacagttccccccagcccggctcagccttatctccgcgtcagccttccggaggacagatacacacaggcatgggctcctaccagcagaactccatggggagctatggtccccaggggggtcagtatggcccacaaggtggctaccccaggcagccaaactataatgccttgcccaatgccaactaccccagtgcaggcatggctggaggcataaaccccatgggtgccggaggtcaaatgcatggacagcctggcatcccaccttatggcacactccctccagggaggatgagtcacgcctccatgggcaaccggccttatggccctaacatggccaatatgccacctcaggttgggtcagggatgtgtcccccaccagggggcatgaaccggaaaacccaagaaactgctgtcgccatgcatgttgctgccaactctatccaaaacaggccgccaggctaccccaatatgaatcaagggggcatgatgggaactggacctccttatggacaagggattaatagtatggctggcatgatcaaccctcagggacccccatattccatgggtggaaccatggccaacaattctgcagggatggcagccagcccagagatgatgggccttggggatgtaaagttaactccagccaccaaaatgaacaacaaggcagatgggacacccaagacagaatccaaatccaagaaatccagttcttctactacaaccaatgagaagatcaccaagttgtatgagctgggtggtgagcctgagaggaagatgtgggtggaccgttatctggccttcactgaggagaaggccatgggcatgacaaatctgcctgctgtgggtaggaaacctctggacctctatcgcctctatgtgtctgtgaaggagattggtggattgactcaggtcaacaagaacaaaaaatggcgggaacttgcaaccaacctcaatgtgggcacatcaagcagtgctgccagctccttgaaaaagcagtatatccagtgtctctatgcctttgaatgcaagattgaacggggagaagaccctcccccagacatctttgcagctgctgattccaagaagtcccagcccaagatccagcctccctctcctgcgggatcaggatctatgcaggggccccagactccccagtcaaccagcagttccatggcagaaggaggagacttaaagccaccaactccagcatccacaccacacagtcagatccccccattgccaggcatgagcaggagcaattcagttgggatccaggatgcctttaatgatggaagtgactccacattccagaagcggaattccatgactccaaaccctgggtatcagcccagtatgaatacctctgacatgatggggcgcatgtcctatgagccaaataaggatccttatggcagcatgaggaaagctccagggagtgatcccttcatgtcctcagggcagggccccaacggcgggatgggtgacccctacagtcgtgctgccggccctgggctaggaaatgtggcgatgggaccacgacagcactatccctatggaggtccttatgacagagtgaggacggagcctggaatagggcctgagggaaacatgagcactggggccccacagccgaatctcatgccttccaacccagactcggggatgtattctcctagccgctaccccccgcagcagcagcagcagcagcagcaacgacatgattcctatggcaatcagttctccacccaaggcaccccttctggcagccccttccccagccagcagactacaatgtatcaacagcaacagcagaattacaagcggccaatggatggcacatatggccctcctgccaagcggcacgaaggggagatgtacagcgtgccatacagcactgggcaggggcagcctcagcagcagcagttgcccccagcccagccccagcctgccagccagcaacaagctgcccagccttcccctcagcaagatgtatacaaccagtatggcaatgcctatcctgccactgccacagctgctactgagcgccgaccagcaggcggcccccagaaccaatttccattccagtttggccgagaccgtgtctctgcaccccctggcaccaatgcccagcaaaacatgccaccacaaatgatgggcggccccatacaggcatcagctgaggttgctcagcaaggcaccatgtggcaggggcgtaatgacatgacctataattatgccaacaggcagagcacgggctctgccccccagggccccgcctatcatggcgtgaaccgaacagatgaaatgctgcacacagatcagagggccaaccacgaaggctcgtggccttcccatggcacacgccagcccccatatggtccctctgcccctgtgccccccatgacaaggccccctccatctaactaccagcccccaccaagcatgcagaatcacattcctcaggtatccagccctgctcccctgccccggccaatggagaaccgcacctctcctagcaagtctccattcctgcactctgggatgaaaatgcagaaggcaggtcccccagtacctgcctcgcacatagcacctgcccctgtgcagccccccatgattcggcgggatatcaccttcccacctggctctgttgaagccacacagcctgtgttgaagcagaggaggcggctcacaatgaaagacattggaaccccggaggcatggcgggtaatgatgtccctcaagtctggtctcctggcagagagcacatgggcattagataccatcaacatcctgctgtatgatgacaacagcatcatgaccttcaacctcagtcagctcccagggttgctagagctccttgtagaatatttccgacgatgcctgattgagatctttggcattttaaaggagtatgaggtgggtgacccaggacagagaacgctactggatcctgggaggttcagcaaggtgtctagtccagctcccatggagggtggggaagaagaagaagaacttctaggtcctaaactagaagaggaagaagaagaggaagtagttgaaaatgatgaggagatagccttttcaggcaaggacaagccagcttcagagaatagtgaggagaagctgatcagtaagtttgacaagcttccagtaaagatcgtacagaagaatgatccatttgtggtggactgctcagataagcttgggcgtgtgcaggagtttgacagtggcctgctgcactggcggattggtgggggggacaccactgagcatatccagacccacttcgagagcaagacagagctgctgccttcccggcctcacgcaccctgcccaccagcccctcggaagcatgtgacaacagcagagggtacaccagggacaacagaccaggaggggcccccacctgatggacctccagaaaaacggatcacagccactatggatgacatgttgtctactcggtctagcaccttgaccgaggatggagctaagagttcagaggccatcaaggagagcagcaagtttccatttggcattagcccagcacagagccaccggaacatcaagatcctagaggacgaaccccacagtaaggatgagaccccactgtgtacccttctggactggcaggattctcttgccaagcgctgcgtctgtgtgtccaataccattcgaagcctgtcatttgtgccaggcaatgactttgagatgtccaaacacccagggctgctgctcatcctgggcaagctgatcctgctgcaccacaagcacccagaacggaagcaggcaccactaacttatgaaaaggaggaggaacaggaccaaggggtgagctgcaacaaagtggagtggtggtgggactgcttggagatgctccgggaaaacaccttggttacactcgccaacatctcggggcagttggacctatctccataccccgagagcatttgcctgcctgtcctggacggactcctacactgggcagtttgcccttcagctgaagcccaggaccccttttccaccctgggccccaatgccgtcctttccccgcagagactggtcttggaaaccctcagcaaactcagcatccaggacaacaatgtggacctgattctggccacaccccccttcagccgcctggagaagttgtatagcactatggtgcgcttcctcagtgaccgaaagaacccggtgtgccgggagatggctgtggtactgctggccaacctggctcagggggacagcctggcagctcgtgccattgcagtgcagaagggcagtatcggcaacctcctgggcttcctagaggacagccttgccgccacacagttccagcagagccaggccagcctcctccacatgcagaacccaccctttgagccaactagtgtggacatgatgcggcgggctgcccgcgcgctgcttgccttggccaaggtggacgagaaccactcagagtttactctgtacgaatcacggctgttggacatctcggtatcaccgttgatgaactcattggtttcacaagtcatttgtgatgtactgtttttgattggccagtcatgacagccgtgggacacctcccccccccgtgtgtgtgtgcgtgtgtggagaacttagaaactgactgttgccctttatttatgcaaaaccacctcagaatccagtttaccctgtgctgtccagcttctcccttgggaaaaagtctctcctgtttctctctcctccttccacctcccctccctccatcacctcacgcctttctgttccttgtcctcaccttactcccctcaggaccctaccccaccctctttgaaaagacaaagctctgcctacatagaagactttttttattttaaccaaagttactgttgtttacagtgagtttggggaaaaaaaataaaataaaaatggctttcccagtccttgcatcaacgggatgccacatttcataactgtttttaatggtaaaaaaaaaaaaaaaaaatacaaaaaaaaattctgaaggacaaaaaaggtgactgctgaactgtgtgtggtttattgttgtacattcacaatcttgcaggagccaagaagttcgcagttgtgaacagaccctgttcactggagaggcctgtgcagtagagtgtagaccctttcatgtactgtactgtacacctgatactgtaaacatactgtaataataatgtctcacatggaaacagaaaacgctgggtcagcagcaagctgtagtttttaaaaatgtttttagttaaacgttgaggagaaaaaaaaaaaaggcttttcccccaaagtatcatgtgtgaacctacaacaccctgacctctttctctcctccttgattgtatgaataaccctgagatcacctcttagaactggttttaacctttagctgcagcggctacgctgccacgtgtgtatatatatgacgttgtacattgcacatacccttggatccccacagtttggtcctcctcccagctacccctttatagtatgacgagttaacaagttggtgacctgcacaaagcgagacacagctatttaatctcttgccagatatcgcccctcttggtgcgatgctgtacaggtctctgtaaaaagtccttgctgtctcagcagccaatcaacttatagtttatttttttctgggtttttgttttgttttgttttctttctaatcgaggtgtgaaaaagttctaggttcagttgaagttctgatgaagaaacacaattgagattttttcagtgataaaatctgcatatttgtatttcaacaatgtagctaaaacttgatgtaaattcctcctttttttccttttttggcttaatgaatatcatttattcagtatgaaatctttatactatatgttccacgtgttaagaataaatgtacattaaatcttggtaagacttt

SEQ ID NO: 28 - DNA, 8581 bp, Homo sapiens
cagaaagcggagagtcacagcggggccaggccctggggagcggagcctccaccgcccccctcattcccaggcaagggcttggggggaatgagccgggagagccgggtcccgagcctacagagccgggagcagctgagccgccggcgcctcggccgccgccgccgcctcctcctcctccgccgccgccagcccggagcctgagccggcggggcgggggggagaggagcgagcgcagcgcagcagcggagccccgcgaggcccgcccgggcgggtggggagggcagcccgggggactgggccccggggcggggtgggagggggggagaagacgaagacagggccgggtctctccgcggacgagacagcggggatcatggccgcgcaggtcgcccccgccgccgccagcagcctgggcaacccgccgccgccgccgccctcggagctgaagaaagccgagcagcagcagcgggaggaggcggggggcgaggcggcggcggcggcagcggccgagcgcggggaaatgaaggcagccgccgggcaggaaagcgagggccccgccgtggggccgccgcagccgctgggaaaggagctgcaggacggggccgagagcaatgggggtggcggcggcggcggagccggcagcggcggcgggcccggcgcggagccggacctgaagaactcgaacgggaacgcgggccctaggcccgccctgaacaataacctcacggagccgcccggcggcggcggtggcggcagcagcgatggggtgggggcgcctcctcactcagccgcggccgccttgccgcccccagcctacggcttcgggcaaccctacggccggagcccgtctgccgtcgccgccgccgcggccgccgtcttccaccaacaacatggcggacaacaaagccctggcctggcagcgctgcagagcggcggcggcgggggcctggagccctacgcggggccccagcagaactctcacgaccacggcttccccaaccaccagtacaactcctactaccccaaccgcagcgcctaccccccgcccgccccggcctacgcgctgagctccccgagaggtggcactccgggctccggcgcggcggcggctgccggctccaagccgcctccctcctccagcgcctccgcctcctcgtcgtcttcgtccttcgctcagcagcgcttcggggccatggggggaggcggcccctccgcggccggcgggggaactccccagcccaccgccacccccaccctcaaccaactgctcacgtcgcccagctcggcccggggctaccagggctaccccgggggcgactacagtggcgggccccaggacgggggcgccggcaagggcccggcggacatggcctcgcagtgttggggggctgcggcggcggcagctgcggcggcggccgcctcgggaggggcccaacaaaggagccaccacgcgcccatgagccccgggagcagcggcggcggggggcagccgctcgcccggacccctcagccatccagtccaatggatcagatgggcaagatgagacctcagccatatggcgggactaacccatactcgcagcaacagggacctccgtcaggaccgcagcaaggacatgggtacccagggcagccatacgggtcccagaccccgcagcggtacccgatgaccatgcagggccgggcgcagagtgccatgggcggcctctcttatacacagcagattcctccttatggacaacaaggccccagcgggtatggtcaacagggccagactccatattacaaccagcaaagtcctcaccctcagcagcagcagccaccctactcccagcaaccaccgtcccagacccctcatgcccaaccttcgtatcagcagcagccacagtctcaaccaccacagctccagtcctctcagcctccatactcccagcagccatcccagcctccacatcagcagtccccggctccatacccctcccagcagtcgacgacacagcagcacccccagagccagcccccctactcacagccacaggctcagtctccttaccagcagcagcaacctcagcagccagcaccctcgacgctctcccagcaggctgcgtatcctcagccccagtctcagcagtcccagcaaactgcctattcccagcagcgcttccctccaccgcaggagctatctcaagattcatttgggtctcaggcatcctcagccccctcaatgacctccagtaagggagggcaagaagatatgaacctgagccttcagtcaagaccctccagcttgcctgatctatctggttcaatagatgacctccccatggggacagaaggagctctgagtcctggagtgagcacatcagggatttccagcagccaaggagagcagagtaatccagctcagtctcctttctctcctcatacctcccctcacctgcctggcatccgaggcccttccccgtcccctgttggctctcccgccagtgttgctcagtctcgctcaggaccactctcgcctgctgcagtgccaggcaaccagatgccacctcggccacccagtggccagtcggacagcatcatgcatccttccatgaaccaatcaagcattgcccaagatcgaggttatatgcagaggaacccccagatgccccagtacagttccccccagcccggctcagccttatctccgcgtcagccttccggaggacagatacacacaggcatgggctcctaccagcagaactccatggggagctatggtccccaggggggtcagtatggcccacaaggtggctaccccaggcagccaaactataatgccttgcccaatgccaactaccccagtgcaggcatggctggaggcataaaccccatgggtgccggaggtcaaatgcatggacagcctggcatcccaccttatggcacactccctccagggaggatgagtcacgcctccatgggcaaccggccttatggccctaacatggccaatatgccacctcaggttgggtcagggatgtgtcccccaccagggggcatgaaccggaaaacccaagaaactgctgtcgccatgcatgttgctgccaactctatccaaaacaggccgccaggctaccccaatatgaatcaagggggcatgatgggaactggacctccttatggacaagggattaatagtatggctggcatgatcaaccctcagggacccccatattccatgggtggaaccatggccaacaattctgcagggatggcagccagcccagagatgatgggccttggggatgtaaagttaactccagccaccaaaatgaacaacaaggcagatgggacacccaagacagaatccaaatccaagaaatccagttcttctactacaaccaatgagaagatcaccaagttgtatgagctgggtggtgagcctgagaggaagatgtgggtggaccgttatctggccttcactgaggagaaggccatgggcatgacaaatctgcctgctgtgggtaggaaacctctggacctctatcgcctctatgtgtctgtgaaggagattggtggattgactcaggtcaacaagaacaaaaaatggcgggaacttgcaaccaacctcaatgtgggcacatcaagcagtgctgccagctccttgaaaaagcagtatatccagtgtctctatgcctttgaatgcaagattgaacggggagaagaccctcccccagacatctttgcagctgctgattccaagaagtcccagcccaagatccagcctccctctcctgcgggatcaggatctatgcaggggccccagactccccagtcaaccagcagttccatggcagaaggaggagacttaaagccaccaactccagcatccacaccacacagtcagatccccccattgccaggcatgagcaggagcaattcagttgggatccaggatgcctttaatgatggaagtgactccacattccagaagcggaattccatgactccaaaccctgggtatcagcccagtatgaatacctctgacatgatggggcgcatgtcctatgagccaaataaggatccttatggcagcatgaggaaagctccagggagtgatcccttcatgtcctcagggcagggccccaacggcgggatgggtgacccctacagtcgtgctgccggccctgggctaggaaatgtggcgatgggaccacgacagcactatccctatggaggtccttatgacagagtgaggacggagcctggaatagggcctgagggaaacatgagcactggggccccacagccgaatctcatgccttccaacccagactcggggatgtattctcctagccgctaccccccgcagcagcagcagcagcagcagcaacgacatgattcctatggcaatcagttctccacccaaggcaccccttctggcagccccttccccagccagcagactacaatgtatcaacagcaacagcagaattacaagcggccaatggatggcacatatggccctcctgccaagcggcacgaaggggagatgtacagcgtgccatacagcactgggcaggggcagcctcagcagcagcagttgcccccagcccagccccagcctgccagccagcaacaagctgcccagccttcccctcagcaagatgtatacaaccagtatggcaatgcctatcctgccactgccacagctgctactgagcgccgaccagcaggcggcccccagaaccaatttccattccagtttggccgagaccgtgtctctgcaccccctggcaccaatgcccagcaaaacatgccaccacaaatgatgggcggccccatacaggcatcagctgaggttgctcagcaaggcaccatgtggcaggggcgtaatgacatgacctataattatgccaacaggcagagcacgggctctgccccccagggccccgcctatcatggcgtgaaccgaacagatgaaatgctgcacacagatcagagggccaaccacgaaggctcgtggccttcccatggcacacgccagcccccatatggtccctctgcccctgtgccccccatgacaaggccccctccatctaccagcccccaccaagcatgcagaatcacattcctcaggtatccagccctgctcccctgccccggccaatggagaaccgcacctctcctagcaagtctccattcctgcactctgggatgaaaatgcagaaggcaggtcccccagtacctgcctcgcacatagcacctgcccctgtgcagccccccatgattcggcgggatatcaccttcccacctggctctgttgaagccacacagcctgtgttgaagcagaggaggcggctcacaatgaaagacattggaaccccggaggcatggcgggtaatgatgtccctcaagtctggtctcctggcagagagcacatgggcattagataccatcaacatcctgctgtatgatgacaacagcatcatgaccttcaacctcagtcagctcccagggttgctagagctccttgtagaatatttccgacgatgcctgattgagatctttggcattttaaaggagtatgaggtgggtgacccaggacagagaacgctactggatcctgggaggttcagcaaggtgtctagtccagctcccatggagggtggggaagaagaagaagaacttctaggtcctaaactagaagaggaagaagaagaggaagtagttgaaaatgatgaggagatagccttttcaggcaaggacaagccagcttcagagaatagtgaggagaagctgatcagtaagtttgacaagcttccagtaaagatcgtacagaagaatgatccatttgtggtggactgctcagataagcttgggcgtgtgcaggagtttgacagtggcctgctgcactggcggattggtgggggggacaccactgagcatatccagacccacttcgagagcaagacagagctgctgccttcccggcctcacgcaccctgcccaccagcccctcggaagcatgtgacaacagcagagggtacaccagggacaacagaccaggaggggcccccacctgatggacctccagaaaaacggatcacagccactatggatgacatgttgtctactcggtctagcaccttgaccgaggatggagctaagagttcagaggccatcaaggagagcagcaagtttccatttggcattagcccagcacagagccaccggaacatcaagatcctagaggacgaaccccacagtaaggatgagaccccactgtgtacccttctggactggcaggattctcttgccaagcgctgcgtctgtgtgtccaataccattcgaagcctgtcatttgtgccaggcaatgactttgagatgtccaaacacccagggctgctgctcatcctgggcaagctgatcctgctgcaccacaagcacccagaacggaagcaggcaccactaacttatgaaaaggaggaggaacaggaccaaggggtgagctgcaacaaagtggagtggtggtgggactgcttggagatgctccgggaaaacaccttggttacactcgccaacatctcggggcagttggacctatctccataccccgagagcatttgcctgcctgtcctggacggactcctacactgggcagtttgcccttcagctgaagcccaggaccccttttccaccctgggccccaatgccgtcctttccccgcagagactggtcttggaaaccctcagcaaactcagcatccaggacaacaatgtggacctgattctggccacaccccccttcagccgcctggagaagttgtatagcactatggtgcgcttcctcagtgaccgaaagaacccggtgtgccgggagatggctgtggtactgctggccaacctggctcagggggacagcctggcagctcgtgccattgcagtgcagaagggcagtatcggcaacctcctgggcttcctagaggacagccttgccgccacacagttccagcagagccaggccagcctcctccacatgcagaacccaccctttgagccaactagtgtggacatgatgcggcgggctgcccgcgcgctgcttgccttggccaaggtggacgagaaccactcagagtttactctgtacgaatcacggctgttggacatctcggtatcaccgttgatgaactcattggtttcacaagtcatttgtgatgtactgtttttgattggccagtcatgacagccgtgggacacctcccccccccgtgtgtgtgtgcgtgtgtggagaacttagaaactgactgttgccctttatttatgcaaaaccacctcagaatccagtttaccctgtgctgtccagcttctcccttgggaaaaagtctctcctgtttctctctcctccttccacctcccctccctccatcacctcacgcctttctgttccttgtcctcaccttactcccctcaggaccctaccccaccctctttgaaaagacaaagctctgcctacatagaagactttttttattttaaccaaagttactgttgtttacagtgagtttggggaaaaaaaataaaataaaaatggctttcccagtccttgcatcaacgggatgccacatttcataactgtttttaatggtaaaaaaaaaaaaaaaaaatacaaaaaaaaattctgaaggacaaaaaaggtgactgctgaactgtgtgtggtttattgttgtacattcacaatcttgcaggagccaagaagttcgcagttgtgaacagaccctgttcactggagaggcctgtgcagtagagtgtagaccctttcatgtactgtactgtacacctgatactgtaaacatactgtaataataatgtctcacatggaaacagaaaacgctgggtcagcagcaagctgtagtttttaaaaatgtttttagttaaacgttgaggagaaaaaaaaaaaaggcttttcccccaaagtatcatgtgtgaacctacaacaccctgacctctttctctcctccttgattgtatgaataaccctgagatcacctcttagaactggttttaacctttagctgcagcggctacgctgccacgtgtgtatatatatgacgttgtacattgcacatacccttggatccccacagtttggtcctcctcccagctacccctttatagtatgacgagttaacaagttggtgacctgcacaaagcgagacacagctatttaatctcttgccagatatcgcccctcttggtgcgatgctgtacaggtctctgtaaaaagtccttgctgtctcagcagccaatcaacttatagtttatttttttctgggtttttgttttgttttgttttctttctaatcgaggtgtgaaaaagttctaggttcagttgaagttctgatgaagaaacacaattgagattttttcagtgataaaatctgcatatttgtatttcaacaatgtagctaaaacttgatgtaaattcctcctttttttccttttttggcttaatgaatatcatttattcagtatgaaatctttatactatatgttccacgtgttaagaataaatgtacattaaatcttggtaagacttt

SEQ ID NO: 29 - DNA, 8585 bp, Homo sapiens
cagaaagcggagagtcacagcggggccaggccctggggagcggagcctccaccgcccccctcattcccaggcaagggcttggggggaatgagccgggagagccgggtcccgagcctacagagccgggagcagctgagccgccggcgcctcggccgccgccgccgcctcctcctcctccgccgccgccagcccggagcctgagccggcggggcgggggggagaggagcgagcgcagcgcagcagcggagccccgcgaggcccgcccgggcgggtggggagggcagcccgggggactgggccccggggcggggtgggagggggggagaagacgaagacagggccgggtctctccgcggacgagacagcggggatcatggccgcgcaggtcgcccccgccgccgccagcagcctgggcaacccgccgccgccgccgccctcggagctgaagaaagccgagcagcagcagcgggaggaggcggggggcgaggcggcggcggcggcagcggccgagcgcggggaaatgaaggcagccgccgggcaggaaagcgagggccccgccgtggggccgccgcagccgctgggaaaggagctgcaggacggggccgagagcaatgggggtggcggcggcggcggagccggcagcggcggcgggcccggcgcggagccggacctgaagaactcgaacgggaacgcgggccctaggcccgccctgaacaataacctcacggagccgcccggcggcggcggtggcggcagcagcgatggggtgggggcgcctcctcactcagccgcggccgccttgccgcccccagcctacggcttcgggcaaccctacggccggagcccgtctgccgtcgccgccgccgcggccgccgtcttccaccaacaacatggcggacaacaaagccctggcctggcagcgctgcagagcggcggcggcgggggcctggagccctacgcggggccccagcagaactctcacgaccacggcttccccaaccaccagtacaactcctactaccccaaccgcagcgcctaccccccgcccgccccggcctacgcgctgagctccccgagaggtggcactccgggctccggcgcggcggcggctgccggctccaagccgcctccctcctccagcgcctccgcctcctcgtcgtcttcgtccttcgctcagcagcgcttcggggccatggggggaggcggcccctccgcggccggcgggggaactccccagcccaccgccacccccaccctcaaccaactgctcacgtcgcccagctcggcccggggctaccagggctaccccgggggcgactacagtggcgggccccaggacgggggcgccggcaagggcccggcggacatggcctcgcagtgttggggggctgcggcggcggcagctgcggcggcggccgcctcgggaggggcccaacaaaggagccaccacgcgcccatgagccccgggagcagcggcggcggggggcagccgctcgcccggacccctcagccatccagtccaatggatcagatgggcaagatgagaccttagccatatggcgggactaacccatactcgcagcaacagggacctccgtcaggaccgcagcaaggacatgggtacccagggcagccatacgggtcccagaccccgcagcggtacccgatgaccatgcagggccgggcgcagagtgccatgggcggcctctcttatacacagcagattcctccttatggacaacaaggccccagcgggtatggtcaacagggccagactccatattacaaccagcaaagtcctcaccctcagcagcagcagccaccctactcccagcaaccaccgtcccagacccctcatgcccaaccttcgtatcagcagcagccacagtctcaaccaccacagctccagtcctctcagcctccatactcccagcagccatcccagcctccacatcagcagtccccggctccatacccctcccagcagtcgacgacacagcagcacccccagagccagcccccctactcacagccacaggctcagtctccttaccagcagcagcaacctcagcagccagcaccctcgacgctctcccagcaggctgcgtatcctcagccccagtctcagcagtcccagcaaactgcctattcccagcagcgcttccctccaccgcaggagctatctcaagattcatttgggtctcaggcatcctcagccccctcaatgacctccagtaagggagggcaagaagatatgaacctgagccttcagtcaagaccctccagcttgcctgatctatctggttcaatagatgacctccccatggggacagaaggagctctgagtcctggagtgagcacatcagggatttccagcagccaaggagagcagagtaatccagctcagtctcctttctctcctcatacctcccctcacctgcctggcatccgaggcccttccccgtcccctgttggctctcccgccagtgttgctcagtctcgctcaggaccactctcgcctgctgcagtgccaggcaaccagatgccacctcggccacccagtggccagtcggacagcatcatgcatccttccatgaaccaatcaagcattgcccaagatcgaggttatatgcagaggaacccccagatgccccagtacagttccccccagcccggctcagccttatctccgcgtcagccttccggaggacagatacacacaggcatgggctcctaccagcagaactccatggggagctatggtccccaggggggtcagtatggcccacaaggtggctaccccaggcagccaaactataatgccttgcccaatgccaactaccccagtgcaggcatggctggaggcataaaccccatgggtgccggaggtcaaatgcatggacagcctggcatcccaccttatggcacactccctccagggaggatgagtcacgcctccatgggcaaccggccttatggccctaacatggccaatatgccacctcaggttgggtcagggatgtgtcccccaccagggggcatgaaccggaaaacccaagaaactgctgtcgccatgcatgttgctgccaactctatccaaaacaggccgccaggctaccccaatatgaatcaagggggcatgatgggaactggacctccttatggacaagggattaatagtatggctggcatgatcaaccctcagggacccccatattccatgggtggaaccatggccaacaattctgcagggatggcagccagcccagagatgatgggccttggggatgtaaagttaactccagccaccaaaatgaacaacaaggcagatgggacacccaagacagaatccaaatccaagaaatccagttcttctactacaaccaatgagaagatcaccaagttgtatgagctgggtggtgagcctgagaggaagatgtgggtggaccgttatctggccttcactgaggagaaggccatgggcatgacaaatctgcctgctgtgggtaggaaacctctggacctctatcgcctctatgtgtctgtgaaggagattggtggattgactcaggtcaacaagaacaaaaaatggcgggaacttgcaaccaacctcaatgtgggcacatcaagcagtgctgccagctccttgaaaaagcagtatatccagtgtctctatgcctttgaatgcaagattgaacggggagaagaccctcccccagacatctttgcagctgctgattccaagaagtcccagcccaagatccagcctccctctcctgcgggatcaggatctatgcaggggccccagactccccagtcaaccagcagttccatggcagaaggaggagacttaaagccaccaactccagcatccacaccacacagtcagatccccccattgccaggcatgagcaggagcaattcagttgggatccaggatgcctttaatgatggaagtgactccacattccagaagcggaattccatgactccaaaccctgggtatcagcccagtatgaatacctctgacatgatggggcgcatgtcctatgagccaaataaggatccttatggcagcatgaggaaagctccagggagtgatcccttcatgtcctcagggcagggccccaacggcgggatgggtgacccctacagtcgtgctgccggccctgggctaggaaatgtggcgatgggaccacgacagcactatccctatggaggtccttatgacagagtgaggacggagcctggaatagggcctgagggaaacatgagcactggggccccacagccgaatctcatgccttccaacccagactcggggatgtattctcctagccgctaccccccgcagcagcagcagcagcagcagcaacgacatgattcctatggcaatcagttctccacccaaggcaccccttctggcagccccttccccagccagcagactacaatgtatcaacagcaacagcagaattacaagcggccaatggatggcacatatggccctcctgccaagcggcacgaaggggagatgtacagcgtgccatacagcactgggcaggggcagcctcagcagcagcagttgcccccagcccagccccagcctgccagccagcaacaagctgcccagccttcccctcagcaagatgtatacaaccagtatggcaatgcctatcctgccactgccacagctgctactgagcgccgaccagcaggcggcccccagaaccaatttccattccagtttggccgagaccgtgtctctgcaccccctggcaccaatgcccagcaaaacatgccaccacaaatgatgggcggccccatacaggcatcagctgaggttgctcagcaaggcaccatgtggcaggggcgtaatgacatgacctataattatgccaacaggcagagcacgggctctgccccccagggccccgcctatcatggcgtgaaccgaacagatgaaatgctgcacacagatcagagggccaaccacgaaggctcgtggccttcccatggcacacgccagcccccatatggtccctctgcccctgtgccccccatgacaaggccccctccatctaactaccagcccccaccaagcatgcagaatcacattcctcaggtatccagccctgctcccctgccccggccaatggagaaccgcacctctcctagcaagtctccattcctgcactctgggatgaaaatgcagaaggcaggtcccccagtacctgcctcgcacatagcacctgcccctgtgcagccccccatgattcggcgggatatcaccttcccacctggctctgttgaagccacacagcctgtgttgaagcagaggaggcggctcacaatgaaagacattggaaccccggaggcatggcgggtaatgatgtccctcaagtctggtctcctggcagagagcacatgggcattagataccatcaacatcctgctgtatgatgacaacagcatcatgaccttcaacctcagtcagctcccagggttgctagagctccttgtagaatatttccgacgatgcctgattgagatctttggcattttaaaggagtatgaggtgggtgacccaggacagagaacgctactggatcctgggaggttcagcaaggtgtctagtccagctcccatggagggtggggaagaagaagaagaacttctaggtcctaaactagaagaggaagaagaagaggaagtagttgaaaatgatgaggagatagccttttcaggcaaggacaagccagcttcagagaatagtgaggagaagctgatcagtaagtttgacaagcttccagtaaagatcgtacagaagaatgatccatttgtggtggactgctcagataagcttgggcgtgtgcaggagtttgacagtggcctgctgcactggcggattggtgggggggacaccactgagcatatccagacccacttcgagagcaagacagagctgctgccttcccggcctcacgcaccctgcccaccagcccctcggaagcatgtgacaacagcagagggtacaccagggacaacagaccaggaggggcccccacctgatggacctccagaaaaacggatcacagccactatggatgacatgttgtctactcggtctagcaccttgaccgaggatggagctaagagttcagaggccatcaaggagagcagcaagtttccatttggcattagcccagcacagagccaccggaacatcaagatcctagaggacgaaccccacagtaaggatgagaccccactgtgtacccttctggactggcaggattctcttgccaagcgctgcgtctgtgtgtccaataccattcgaagcctgtcatttgtgccaggcaatgactttgagatgtccaaacacccagggctgctgctcatcctgggcaagctgatcctgctgcaccacaagcacccagaacggaagcaggcaccactaacttatgaaaaggaggaggaacaggaccaaggggtgagctgcaacaaagtggagtggtggtgggactgcttggagatgctccgggaaaacaccttggttacactcgccaacatctcggggcagttggacctatctccataccccgagagcatttgcctgcctgtcctggacggactcctacactgggcagtttgcccttcagctgaagcccaggaccccttttccaccctgggccccaatgccgtcctttccccgcagagactggtcttggaaaccctcagcaaactcagcatccaggacaacaatgtggacctgattctggccacaccccccttcagccgcctggagaagttgtatagcactatggtgcgcttcctcagtgaccgaaagaacccggtgtgccgggagatggctgtggtactgctggccaacctggctcagggggacagcctggcagctcgtgccattgcagtgcagaagggcagtatcggcaacctcctgggcttcctagaggacagccttgccgccacacagttccagcagagccaggccagcctcctccacatgcagaacccaccctttgagccaactagtgtggacatgatgcggcgggctgcccgcgcgctgcttgccttggccaaggtggacgagaaccactcagagtttactctgtacgaatcacggctgttggacatctcggtatcaccgttgatgaactcattggtttcacaagtcatttgtgatgtactgtttttgattggccagtcatgacagccgtgggacacctcccccccccgtgtgtgtgtgcgtgtgtggagaacttagaaactgactgttgccctttatttatgcaaaaccacctcagaatccagtttaccctgtgctgtccagcttctcccttgggaaaaagtctctcctgtttctctctcctccttccacctcccctccctccatcacctcacgcctttctgttccttgtcctcaccttactcccctcaggaccctaccccaccctctttgaaaagacaaagctctgcctacatagaagactttttttattttaaccaaagttactgttgtttacagtgagtttggggaaaaaaaataaaataaaaatggctttcccagtccttgcatcaacgggatgccacatttcataactgtttttaatggtaaaaaaaaaaaaaaaaaatacaaaaaaaaattctgaaggacaaaaaaggtgactgctgaactgtgtgtggtttattgttgtacattcacaatcttgcaggagccaagaagttcgcagttgtgaacagaccctgttcactggagaggcctgtgcagtagagtgtagaccctttcatgtactgtactgtacacctgatactgtaaacatactgtaataataatgtctcacatggaaacagaaaacgctgggtcagcagcaagctgtagtttttaaaaatgtttttagttaaacgttgaggagaaaaaaaaaaaaggcttttcccccaaagtatcatgtgtgaacctacaacaccctgacctctttctctcctccttgattgtatgaataaccctgagatcacctcttagaactggttttaacctttagctgcagcggctacgctgccacgtgtgtatatatatgacgttgtacattgcacatacccttggatccccacagtttggtcctcctcccagctacccctttatagtatgacgagttaacaagttggtgacctgcacaaagcgagacacagctatttaatctcttgccagatatcgcccctcttggtgcgatgctgtacaggtctctgtaaaaagtccttgctgtctcagcagccaatcaacttatagtttatttttttctgggtttttgttttgttttgttttctttctaatcgaggtgtgaaaaagttctaggttcagttgaagttctgatgaagaaacacaattgagattttttcagtgataaaatctgcatatttgtatttcaacaatgtagctaaaacttgatgtaaattcctcctttttttccttttttggcttaatgaatatcatttattcagtatgaaatctttatactatatgttccacgtgttaagaataaatgtacattaaatcttggtaagacttt

SEQ ID NO: 30 - DNA, 8585 bp, Homo sapiens
cagaaagcggagagtcacagcggggccaggccctggggagcggagcctccaccgcccccctcattcccaggcaagggcttggggggaatgagccgggagagccgggtcccgagcctacagagccgggagcagctgagccgccggcgcctcggccgccgccgccgcctcctcctcctccgccgccgccagcccggagcctgagccggcggggcgggggggagaggagcgagcgcagcgcagcagcggagccccgcgaggcccgcccgggcgggtggggagggcagcccgggggactgggccccggggcggggtgggagggggggagaagacgaagacagggccgggtctctccgcggacgagacagcggggatcatggccgcgcaggtcgcccccgccgccgccagcagcctgggcaacccgccgccgccgccgccctcggagctgaagaaagccgagcagcagcagcgggaggaggcggggggcgaggcggcggcggcggcagcggccgagcgcggggaaatgaaggcagccgccgggcaggaaagcgagggccccgccgtggggccgccgcagccgctgggaaaggagctgcaggacggggccgagagcaatgggggtggcggcggcggcggagccggcagcggcggcgggcccggcgcggagccggacctgaagaactcgaacgggaacgcgggccctaggcccgccctgaacaataacctcacggagccgcccggcggcggcggtggcggcagcagcgatggggtgggggcgcctcctcactcagccgcggccgccttgccgcccccagcctacggcttcgggcaaccctacggccggagcccgtctgccgtcgccgccgccgcggccgccgtcttccaccaacaacatggcggacaacaaagccctggcctggcagcgctgcagagcggcggcggcgggggcctggagccctacgcggggccccagcagaactctcacgaccacggcttccccaaccaccagtacaactcctactaccccaaccgcagcgcctaccccccgcccgccccggcctacgcgctgagctccccgagaggtggcactccgggctccggcgcggcggcggctgccggctccaagccgcctccctcctccagcgcctccgcctcctcgtcgtcttcgtccttcgctcagcagcgcttcggggccatggggggaggcggcccctccgcggccggcgggggaactccccagcccaccgccacccccaccctcaaccaactgctcacgtcgcccagctcggcccggggctaccagggctaccccgggggcgactacagtggcgggccccaggacgggggcgccggcaagggcccggcggacatggcctcgcagtgttggggggctgcggcggcggcagctgcggcggcggccgcctcgggaggggcccaacaaaggagccaccacgcgcccatgagccccgggagcagcggcggcggggggcagccgctcgcccggacccctcagccatccagtccaatggatcagatgggcaagatgagacctcagccatatggcgggactaacccatactcgcagcaacagggacctccgtcaggaccgcagcaaggacatgggtacccagggcagccatacgggtcccagaccccgcagcggtacccgatgaccatgcagggccgggcgcagagtgccatgggcggcctctcttatacacagcagattcctccttatggacaacaaggccccagcgggtatggtcaacagggccagactccatattacaaccagcaaagtcctcaccctcagcagcagcagccaccctactcccagcaaccaccgtcccagacccctcatgcccaaccttcgtatcagcagcagccacagtctcaaccaccacagctccagtcctctcagcctccatactcccagcagccatcccagcctccacatcagcagtccccggctccatacccctcccagcagtcgacgacacagcagcacccccagagccagcccccctactcacagccacaggctcagtctccttaccagcagcagcaacctcagcagccagcaccctcgacgctctcccagcaggctgcgtatcctcagccccagtctcagcagtcccagcaaactgcctattcccagcagcgcttccctccaccgcaggagctatctcaagattcatttgggtctcaggcatcctcagccccctcaatgacctccagtaagggagggcaagaagatatgaacctgagccttcagtcaagaccctccagcttgcctgatctatctggttcaatagatgacctccccatggggacagaaggagctctgagtcctggagtgagcacatcagggatttccagcagccaaggagagcagagtaatccagctcagtctcctttctctcctcatacctcccctcacctgcctggcatccgaggcccttccccgtcccctgttggctctcccgccagtgttgctcagtctcgctcaggaccactctcgcctgctgcagtgccaggcaaccagatgccacctcggccacccagtggccagtcggacagcatcatgcatccttccatgaaccaatcaagcattgcccaagatcgaggttatatgcagaggaacccccagatgccccagtacagttccccccagcccggctcagccttatctccgcgtcagccttccggaggacagatacacacaggcatgggctcctaccagcagaactccatggggagctatggtccccaggggggtcagtatggcccacaaggtggctaccccaggcagccaaactataatgccttgcccaatgccaactaccccagtgcaggcatggctggaggcataaaccccatgggtgccggaggtcaaatgcatggacagcctggcatcccaccttatggcacactccctccagggaggatgagtcacgcctccatgggcaaccggccttatggccctaacatggccaatatgccacctcaggttgggtcagggatgtgtcccccaccagggggcatgaaccggaaaacccaagaaactgctgtcgccatgcatgttgctgccaactctatccaaaacaggccgccaggctaccccaatatgaatcaagggggcatgatgggaactggacctccttatggacaagggattaatagtatggctggcatgatcaaccctcagggacccccatattccatgggtggaaccatggccaacaattctgcagggatggcagccagcccagagatgatgggccttggggatgtaaagttaactccagccaccaaaatgaacaacaaggcagatgggacacccaagacagaatccaaatccaagaaatccagttcttctactacaaccaatgagaagatcaccaagttgtatgagctgggtggtgagcctgagaggaagatgtgggtggaccgttatctggccttcactgaggagaaggccatgggcatgacaaatctgcctgctgtgggtaggaaacctctggacctctatcgcctctatgtgtctgtgaaggagattggtggattgactcaggtcaacaagaacaaaaaatggcgggaacttgcaaccaacctcaatgtgggcacatcaagcagtgctgccagctccttgaaaaagcagtatatccagtgtctctatgcctttgaatgcaagattgaacggggagaagaccctcccccagacatctttgcagctgctgattccaagaagtcccagcccaagatccagcctccctctcctgcgggatcaggatctatgcaggggccccagactccccagtcaaccagcagttccatggcagaaggaggagacttaaagccaccaactccagcatccacaccacacagtcagatccccccattgccaggcatgagcaggagcaattcagttgggatccaggatgcctttaatgatggaagtgactccacattccagaagcggaattccatgactccaaaccctgggtatcagcccagtatgaatacctctgacatgatggggcgcatgtcctatgagccaaataaggatccttatggcagcatgaggaaagctccagggagtgatcccttcatgtcctcagggcagggccccaacggcgggatgggtgacccctacagtcgtgctgccggccctgggctaggaaatgtggcgatgggaccacgacagcactatccctatggaggtccttatgacagagtgaggacggagcctggaatagggcctgagggaaacatgagcactggggccccacagccgaatctcatgccttccaacccagactcggggatgtattctcctagccgctaccccccgcagcagcagcagcagcagcagcaacgacatgattcctatggcaatcagttctccacccaaggcaccccttctggcagccccttccccagccagcagactacaatgtatcaacagcaacagcagaattacaagcggccaatggatggcacatatggccctcctgccaagcggcacgaaggggagatgtacagcgtgccatacagcactgggcaggggcagcctcagcagcagcagttgcccccagcccagccccagcctgccagccagcaacaagctgcccagccttcccctcagcaagatgtatacaaccagtatggcaatgcctatcctgccactgccacagctgctactgagcgccgaccagcaggcggcccccagaaccaatttccattccagtttggccgagaccgtgtctctgcaccccctggcaccaatgcccagcaaaacatgccaccacaaatgatgggcggccccatacaggcatcagctgaggttgctcagcaaggcaccatgtggcaggggcgtaatgacatgacctataattatgccaacaggcagagcacgggctctgccccccagggccccgcctatcatggcgtgaaccgaacagatgaaatgctgcacacagatcagagggccaaccacgaaggctcgtggccttcccatggcacacgccagcccccatatggtccctctgcccctgtgccccccatgacaaggccccctccatctaactaccagcccccaccaagcatgcagaatcacattcctcaggtatccagccctgctcccctgccccggccaatggagaaccgcacctctcctagcaagtctccattcctgcactctgggatgaaaatgcagaaggcaggtcccccagtacctgcctcgcacatagcacctgcccctgtgcagccccccatgattcggcgggatatcaccttcccacctggctctgttgaagccacacagcctgtgttgaagcagaggaggcggctcacaatgaaagacattggaaccccggaggcatggcgggtaatgatgtccctcaagtctggtctcctggcagagagcacatgggcattagataccatcaacatcctgctgtatgatgacaacagcatcatgaccttcaacctcagtcagctcccagggttgctagagctccttgtagaatatttccgacgatgcctgattgagatctttggcattttaaaggagtatgaggtgggtgacccaggacagagaacgctactggatcctgggaggttcagcaaggtgtctagtccagctcccatggagggtggggaagaagaagaagaacttctaggtcctaaactagaagaggaagaagaagaggaagtagttgaaaatgatgaggagatagccttttcaggcaaggacaagccagcttcagagaatagtgaggagaagctgatcagtaagtttgacaagcttccagtaaagatcgtacagaagaatgatccatttgtggtggactgctcagataagctttggcgtgtgcaggagtttgacagtggcctgctgcactggcggattggtgggggggacaccactgagcatatccagacccacttcgagagcaagacagagctgctgccttcccggcctcacgcaccctgcccaccagcccctcggaagcatgtgacaacagcagagggtacaccagggacaacagaccaggaggggcccccacctgatggacctccagaaaaacggatcacagccactatggatgacatgttgtctactcggtctagcaccttgaccgaggatggagctaagagttcagaggccatcaaggagagcagcaagtttccatttggcattagcccagcacagagccaccggaacatcaagatcctagaggacgaaccccacagtaaggatgagaccccactgtgtacccttctggactggcaggattctcttgccaagcgctgcgtctgtgtgtccaataccattcgaagcctgtcatttgtgccaggcaatgactttgagatgtccaaacacccagggctgctgctcatcctgggcaagctgatcctgctgcaccacaagcacccagaacggaagcaggcaccactaacttatgaaaaggaggaggaacaggaccaaggggtgagctgcaacaaagtggagtggtggtgggactgcttggagatgctccgggaaaacaccttggttacactcgccaacatctcggggcagttggacctatctccataccccgagagcatttgcctgcctgtcctggacggactcctacactgggcagtttgcccttcagctgaagcccaggaccccttttccaccctgggccccaatgccgtcctttccccgcagagactggtcttggaaaccctcagcaaactcagcatccaggacaacaatgtggacctgattctggccacaccccccttcagccgcctggagaagttgtatagcactatggtgcgcttcctcagtgaccgaaagaacccggtgtgccgggagatggctgtggtactgctggccaacctggctcagggggacagcctggcagctcgtgccattgcagtgcagaagggcagtatcggcaacctcctgggcttcctagaggacagccttgccgccacacagttccagcagagccaggccagcctcctccacatgcagaacccaccctttgagccaactagtgtggacatgatgcggcgggctgcccgcgcgctgcttgccttggccaaggtggacgagaaccactcagagtttactctgtacgaatcacggctgttggacatctcggtatcaccgttgatgaactcattggtttcacaagtcatttgtgatgtactgtttttgattggccagtcatgacagccgtgggacacctcccccccccgtgtgtgtgtgcgtgtgtggagaacttagaaactgactgttgccctttatttatgcaaaaccacctcagaatccagtttaccctgtgctgtccagcttctcccttgggaaaaagtctctcctgtttctctctcctccttccacctcccctccctccatcacctcacgcctttctgttccttgtcctcaccttactcccctcaggaccctaccccaccctctttgaaaagacaaagctctgcctacatagaagactttttttattttaaccaaagttactgttgtttacagtgagtttggggaaaaaaaataaaataaaaatggctttcccagtccttgcatcaacgggatgccacatttcataactgtttttaatggtaaaaaaaaaaaaaaaaaatacaaaaaaaaattctgaaggacaaaaaaggtgactgctgaactgtgtgtggtttattgttgtacattcacaatcttgcaggagccaagaagttcgcagttgtgaacagaccctgttcactggagaggcctgtgcagtagagtgtagaccctttcatgtactgtactgtacacctgatactgtaaacatactgtaataataatgtctcacatggaaacagaaaacgctgggtcagcagcaagctgtagtttttaaaaatgtttttagttaaacgttgaggagaaaaaaaaaaaaggcttttcccccaaagtatcatgtgtgaacctacaacaccctgacctctttctctcctccttgattgtatgaataaccctgagatcacctcttagaactggttttaacctttagctgcagcggctacgctgccacgtgtgtatatatatgacgttgtacattgcacatacccttggatccccacagtttggtcctcctcccagctacccctttatagtatgacgagttaacaagttggtgacctgcacaaagcgagacacagctatttaatctcttgccagatatcgcccctcttggtgcgatgctgtacaggtctctgtaaaaagtccttgctgtctcagcagccaatcaacttatagtttatttttttctgggtttttgttttgttttgttttctttctaatcgaggtgtgaaaaagttctaggttcagttgaagttctgatgaagaaacacaattgagattttttcagtgataaaatctgcatatttgtatttcaacaatgtagctaaaacttgatgtaaattcctcctttttttccttttttggcttaatgaatatcatttattcagtatgaaatctttatactatatgttccacgtgttaagaataaatgtacattaaatcttggtaagacttt

SEQ ID NO: 31 - DNA, 8585 bp, Homo sapiens
cagaaagcggagagtcacagcggggccaggccctggggagcggagcctccaccgcccccctcattcccaggcaagggcttggggggaatgagccgggagagccgggtcccgagcctacagagccgggagcagctgagccgccggcgcctcggccgccgccgccgcctcctcctcctccgccgccgccagcccggagcctgagccggcggggcgggggggagaggagcgagcgcagcgcagcagcggagccccgcgaggcccgcccgggcgggtggggagggcagcccgggggactgggccccggggcggggtgggagggggggagaagacgaagacagggccgggtctctccgcggacgagacagcggggatcatggccgcgcaggtcgcccccgccgccgccagcagcctgggcaacccgccgccgccgccgccctcggagctgaagaaagccgagcagcagcagcgggaggaggcggggggcgaggcggcggcggcggcagcggccgagcgcggggaaatgaaggcagccgccgggcaggaaagcgagggccccgccgtggggccgccgcagccgctgggaaaggagctgcaggacggggccgagagcaatgggggtggcggcggcggcggagccggcagcggcggcgggcccggcgcggagccggacctgaagaactcgaacgggaacgcgggccctaggcccgccctgaacaataacctcacggagccgcccggcggcggcggtggcggcagcagcgatggggtgggggcgcctcctcactcagccgcggccgccttgccgcccccagcctacggcttcgggcaaccctacggccggagcccgtctgccgtcgccgccgccgcggccgccgtcttccaccaacaacatggcggacaacaaagccctggcctggcagcgctgcagagcggcggcggcgggggcctggagccctacgcggggccccagcagaactctcacgaccacggcttccccaaccaccagtacaactcctactaccccaaccgcagcgcctaccccccgcccgccccggcctacgcgctgagctccccgagaggtggcactccgggctccggcgcggcggcggctgccggctccaagccgcctccctcctccagcgcctccgcctcctcgtcgtcttcgtccttcgctcagcagcgcttcggggccatggggggaggcggcccctccgcggccggcgggggaactccccagcccaccgccacccccaccctcaaccaactgctcacgtcgcccagctcggcccggggctaccagggctaccccgggggcgactacagtggcgggccccaggacgggggcgccggcaagggcccggcggacatggcctcgcagtgttggggggctgcggcggcggcagctgcggcggcggccgcctcgggaggggcccaacaaaggagccaccacgcgcccatgagccccgggagcagcggcggcggggggcagccgctcgcccggacccctcagccatccagtccaatggatcagatgggcaagatgagacctcagccatatggcgggactaacccatactcgcagcaacagggacctccgtcaggaccgcagcaaggacatgggtacccagggcagccatacgggtcccagaccccgcagcggtacccgatgaccatgcagggccgggcgcagagtgccatgggcggcctctcttatacacagcagattcctccttatggataacaaggccccagcgggtatggtcaacagggccagactccatattacaaccagcaaagtcctcaccctcagcagcagcagccaccctactcccagcaaccaccgtcccagacccctcatgcccaaccttcgtatcagcagcagccacagtctcaaccaccacagctccagtcctctcagcctccatactcccagcagccatcccagcctccacatcagcagtccccggctccatacccctcccagcagtcgacgacacagcagcacccccagagccagcccccctactcacagccacaggctcagtctccttaccagcagcagcaacctcagcagccagcaccctcgacgctctcccagcaggctgcgtatcctcagccccagtctcagcagtcccagcaaactgcctattcccagcagcgcttccctccaccgcaggagctatctcaagattcatttgggtctcaggcatcctcagccccctcaatgacctccagtaagggagggcaagaagatatgaacctgagccttcagtcaagaccctccagcttgcctgatctatctggttcaatagatgacctccccatggggacagaaggagctctgagtcctggagtgagcacatcagggatttccagcagccaaggagagcagagtaatccagctcagtctcctttctctcctcatacctcccctcacctgcctggcatccgaggcccttccccgtcccctgttggctctcccgccagtgttgctcagtctcgctcaggaccactctcgcctgctgcagtgccaggcaaccagatgccacctcggccacccagtggccagtcggacagcatcatgcatccttccatgaaccaatcaagcattgcccaagatcgaggttatatgcagaggaacccccagatgccccagtacagttccccccagcccggctcagccttatctccgcgtcagccttccggaggacagatacacacaggcatgggctcctaccagcagaactccatggggagctatggtccccaggggggtcagtatggcccacaaggtggctaccccaggcagccaaactataatgccttgcccaatgccaactaccccagtgcaggcatggctggaggcataaaccccatgggtgccggaggtcaaatgcatggacagcctggcatcccaccttatggcacactccctccagggaggatgagtcacgcctccatgggcaaccggccttatggccctaacatggccaatatgccacctcaggttgggtcagggatgtgtcccccaccagggggcatgaaccggaaaacccaagaaactgctgtcgccatgcatgttgctgccaactctatccaaaacaggccgccaggctaccccaatatgaatcaagggggcatgatgggaactggacctccttatggacaagggattaatagtatggctggcatgatcaaccctcagggacccccatattccatgggtggaaccatggccaacaattctgcagggatggcagccagcccagagatgatgggccttggggatgtaaagttaactccagccaccaaaatgaacaacaaggcagatgggacacccaagacagaatccaaatccaagaaatccagttcttctactacaaccaatgagaagatcaccaagttgtatgagctgggtggtgagcctgagaggaagatgtgggtggaccgttatctggccttcactgaggagaaggccatgggcatgacaaatctgcctgctgtgggtaggaaacctctggacctctatcgcctctatgtgtctgtgaaggagattggtggattgactcaggtcaacaagaacaaaaaatggcgggaacttgcaaccaacctcaatgtgggcacatcaagcagtgctgccagctccttgaaaaagcagtatatccagtgtctctatgcctttgaatgcaagattgaacggggagaagaccctcccccagacatctttgcagctgctgattccaagaagtcccagcccaagatccagcctccctctcctgcgggatcaggatctatgcaggggccccagactccccagtcaaccagcagttccatggcagaaggaggagacttaaagccaccaactccagcatccacaccacacagtcagatccccccattgccaggcatgagcaggagcaattcagttgggatccaggatgcctttaatgatggaagtgactccacattccagaagcggaattccatgactccaaaccctgggtatcagcccagtatgaatacctctgacatgatggggcgcatgtcctatgagccaaataaggatccttatggcagcatgaggaaagctccagggagtgatcccttcatgtcctcagggcagggccccaacggcgggatgggtgacccctacagtcgtgctgccggccctgggctaggaaatgtggcgatgggaccacgacagcactatccctatggaggtccttatgacagagtgaggacggagcctggaatagggcctgagggaaacatgagcactggggccccacagccgaatctcatgccttccaacccagactcggggatgtattctcctagccgctaccccccgcagcagcagcagcagcagcagcaacgacatgattcctatggcaatcagttctccacccaaggcaccccttctggcagccccttccccagccagcagactacaatgtatcaacagcaacagcagaattacaagcggccaatggatggcacatatggccctcctgccaagcggcacgaaggggagatgtacagcgtgccatacagcactgggcaggggcagcctcagcagcagcagttgcccccagcccagccccagcctgccagccagcaacaagctgcccagccttcccctcagcaagatgtatacaaccagtatggcaatgcctatcctgccactgccacagctgctactgagcgccgaccagcaggcggcccccagaaccaatttccattccagtttggccgagaccgtgtctctgcaccccctggcaccaatgcccagcaaaacatgccaccacaaatgatgggcggccccatacaggcatcagctgaggttgctcagcaaggcaccatgtggcaggggcgtaatgacatgacctataattatgccaacaggcagagcacgggctctgccccccagggccccgcctatcatggcgtgaaccgaacagatgaaatgctgcacacagatcagagggccaaccacgaaggctcgtggccttcccatggcacacgccagcccccatatggtccctctgcccctgtgccccccatgacaaggccccctccatctaactaccagcccccaccaagcatgcagaatcacattcctcaggtatccagccctgctcccctgccccggccaatggagaaccgcacctctcctagcaagtctccattcctgcactctgggatgaaaatgcagaaggcaggtcccccagtacctgcctcgcacatagcacctgcccctgtgcagccccccatgattcggcgggatatcaccttcccacctggctctgttgaagccacacagcctgtgttgaagcagaggaggcggctcacaatgaaagacattggaaccccggaggcatggcgggtaatgatgtccctcaagtctggtctcctggcagagagcacatgggcattagataccatcaacatcctgctgtatgatgacaacagcatcatgaccttcaacctcagtcagctcccagggttgctagagctccttgtagaatatttccgacgatgcctgattgagatctttggcattttaaaggagtatgaggtgggtgacccaggacagagaacgctactggatcctgggaggttcagcaaggtgtctagtccagctcccatggagggtggggaagaagaagaagaacttctaggtcctaaactagaagaggaagaagaagaggaagtagttgaaaatgatgaggagatagccttttcaggcaaggacaagccagcttcagagaatagtgaggagaagctgatcagtaagtttgacaagcttccagtaaagatcgtacagaagaatgatccatttgtggtggactgctcagataagcttgggcgtgtgcaggagtttgacagtggcctgctgcactggcggattggtgggggggacaccactgagcatatccagacccacttcgagagcaagacagagctgctgccttcccggcctcacgcaccctgcccaccagcccctcggaagcatgtgacaacagcagagggtacaccagggacaacagaccaggaggggcccccacctgatggacctccagaaaaacggatcacagccactatggatgacatgttgtctactcggtctagcaccttgaccgaggatggagctaagagttcagaggccatcaaggagagcagcaagtttccatttggcattagcccagcacagagccaccggaacatcaagatcctagaggacgaaccccacagtaaggatgagaccccactgtgtacccttctggactggcaggattctcttgccaagcgctgcgtctgtgtgtccaataccattcgaagcctgtcatttgtgccaggcaatgactttgagatgtccaaacacccagggctgctgctcatcctgggcaagctgatcctgctgcaccacaagcacccagaacggaagcaggcaccactaacttatgaaaaggaggaggaacaggaccaaggggtgagctgcaacaaagtggagtggtggtgggactgcttggagatgctccgggaaaacaccttggttacactcgccaacatctcggggcagttggacctatctccataccccgagagcatttgcctgcctgtcctggacggactcctacactgggcagtttgcccttcagctgaagcccaggaccccttttccaccctgggccccaatgccgtcctttccccgcagagactggtcttggaaaccctcagcaaactcagcatccaggacaacaatgtggacctgattctggccacaccccccttcagccgcctggagaagttgtatagcactatggtgcgcttcctcagtgaccgaaagaacccggtgtgccgggagatggctgtggtactgctggccaacctggctcagggggacagcctggcagctcgtgccattgcagtgcagaagggcagtatcggcaacctcctgggcttcctagaggacagccttgccgccacacagttccagcagagccaggccagcctcctccacatgcagaacccaccctttgagccaactagtgtggacatgatgcggcgggctgcccgcgcgctgcttgccttggccaaggtggacgagaaccactcagagtttactctgtacgaatcacggctgttggacatctcggtatcaccgttgatgaactcattggtttcacaagtcatttgtgatgtactgtttttgattggccagtcatgacagccgtgggacacctcccccccccgtgtgtgtgtgcgtgtgtggagaacttagaaactgactgttgccctttatttatgcaaaaccacctcagaatccagtttaccctgtgctgtccagcttctcccttgggaaaaagtctctcctgtttctctctcctccttccacctcccctccctccatcacctcacgcctttctgttccttgtcctcaccttactcccctcaggaccctaccccaccctctttgaaaagacaaagctctgcctacatagaagactttttttattttaaccaaagttactgttgtttacagtgagtttggggaaaaaaaataaaataaaaatggctttcccagtccttgcatcaacgggatgccacatttcataactgtttttaatggtaaaaaaaaaaaaaaaaaatacaaaaaaaaattctgaaggacaaaaaaggtgactgctgaactgtgtgtggtttattgttgtacattcacaatcttgcaggagccaagaagttcgcagttgtgaacagaccctgttcactggagaggcctgtgcagtagagtgtagaccctttcatgtactgtactgtacacctgatactgtaaacatactgtaataataatgtctcacatggaaacagaaaacgctgggtcagcagcaagctgtagtttttaaaaatgtttttagttaaacgttgaggagaaaaaaaaaaaaggcttttcccccaaagtatcatgtgtgaacctacaacaccctgacctctttctctcctccttgattgtatgaataaccctgagatcacctcttagaactggttttaacctttagctgcagcggctacgctgccacgtgtgtatatatatgacgttgtacattgcacatacccttggatccccacagtttggtcctcctcccagctacccctttatagtatgacgagttaacaagttggtgacctgcacaaagcgagacacagctatttaatctcttgccagatatcgcccctcttggtgcgatgctgtacaggtctctgtaaaaagtccttgctgtctcagcagccaatcaacttatagtttatttttttctgggtttttgttttgttttgttttctttctaatcgaggtgtgaaaaagttctaggttcagttgaagttctgatgaagaaacacaattgagattttttcagtgataaaatctgcatatttgtatttcaacaatgtagctaaaacttgatgtaaattcctcctttttttccttttttggcttaatgaatatcatttattcagtatgaaatctttatactatatgttccacgtgttaagaataaatgtacattaaatcttggtaagacttt

SEQ ID NO: 32 - DNA, 8584 bp, Homo sapiens
cagaaagcggagagtcacagcggggccaggccctggggagcggagcctccaccgcccccctcattcccaggcaagggcttggggggaatgagccgggagagccgggtcccgagcctacagagccgggagcagctgagccgccggcgcctcggccgccgccgccgcctcctcctcctccgccgccgccagcccggagcctgagccggcggggcgggggggagaggagcgagcgcagcgcagcagcggagccccgcgaggcccgcccgggcgggtggggagggcagcccgggggactgggccccggggcggggtgggagggggggagaagacgaagacagggccgggtctctccgcggacgagacagcggggatcatggccgcgcaggtcgcccccgccgccgccagcagcctgggcaacccgccgccgccgccgccctcggagctgaagaaagccgagcagcagcagcgggaggaggcggggggcgaggcggcggcggcggcagcggccgagcgcggggaaatgaaggcagccgccgggcaggaaagcgagggccccgccgtggggccgccgcagccgctgggaaaggagctgcaggacggggccgagagcaatgggggtggcggcggcggcggagccggcagcggcggcgggcccggcgcggagccggacctgaagaactcgaacgggaacgcgggccctaggcccgccctgaacaataacctcacggagccgcccggcggcggcggtggcggcagcagcgatggggtgggggcgcctcctcactcagccgcggccgccttgccgcccccagcctacggcttcgggcaaccctacggccggagcccgtctgccgtcgccgccgccgcggccgccgtcttccaccaacaacatggcggacaacaaagccctggcctggcagcgctgcagagcggcggcggcgggggcctggagccctacgcggggccccagcagaactctcacgaccacggcttccccaaccaccagtacaactcctactaccccaaccgcagcgcctaccccccgcccgccccggcctacgcgctgagctccccgagaggtggcactccgggctccggcgcggcggcggctgccggctccaagccgcctccctcctccagcgcctccgcctcctcgtcgtcttcgtccttcgctcagcagcgcttcggggccatggggggaggcggcccctccgcggccggcgggggaactccccagcccaccgccacccccaccctcaaccaactgctcacgtcgcccagctcggcccggggctaccagggctaccccgggggcgactacagtggcgggccccaggacgggggcgccggcaagggcccggcggacatggcctcgcagtgttggggggctgcggcggcggcagctgcggcggcggccgcctcgggaggggcccaacaaaggagccaccacgcgcccatgagccccgggagcagcggcggcggggggcagccgctcgcccggacccctcagccatccagtccaatggatcagatgggcaagatgagacctcagccatatggcgggactaacccatactcgcagcaacagggacctccgtcaggaccgcagcaaggacatgggtacccagggcagccatacgggtcccagaccccgcagcggtacccgatgaccatgcagggccgggcgcagagtgccatgggcggcctctcttatacacagcagattcctccttatggacaacaaggccccagcgggtatggtcaacagggccagactccatattacaaccagcaaagtcctcaccctcagcagcagcagccaccctactcccagcaaccaccgtcccagacccctcatgcccaaccttcgtatcagcagcagccacagtctcaaccaccacagctccagtcctctcagcctccatactcccagcagccatcccagcctccacatcagcagtccccggctccatacccctcccagcagtcgacgacacagcagcacccccagagccagcccccctactcacagccacaggctcagtctccttaccagcagcagcaacctcagcagccagcaccctcgacgctctcccagcaggctgcgtatcctcagccccagtctcagcagtcccagcaaactgcctattcccagcagcgcttccctccaccgcaggagctatctcaagattcatttgggtctcaggcatcctcagccccctcaatgacctccagtaagggagggcaagaagatatgaacctgagccttcagtcaagaccctccagcttgcctgatctatctggttcaatagatgacctccccatggggacagaaggagctctgagtcctggagtgagcacatcagggatttccagcagccaaggagagcagagtaatccagctcagtctcctttctctcctcatacctcccctcacctgcctggcatccgaggcccttccccgtcccctgttggctctcccgccagtgttgctcagtctcgctcaggaccactctcgcctgctgcagtgccaggcaaccagatgccacctcggccacccagtggccagtcggacagcatcatgcatccttccatgaaccaatcaagcattgcccaagatcgaggttatatgcagaggaacccccagatgccccagtacagttccccccagcccggctcagccttatctccgcgtcagccttccggaggacagatacacacaggcatgggctcctaccagcagaactccatggggagctatggtccccaggggggtcagtatggcccacaaggtggctaccccaggcagccaaactataatgccttgcccaatgccaactaccccagtgcaggcatggctggaggcataaaccccatgggtgccggaggtcaaatgcatggacagcctggcatcccaccttatggcacactccctccagggaggatgagtcacgcctccatgggcaaccggccttatggccctaacatggccaatatgccacctcaggttgggtcagggatgtgtcccccaccagggggcatgaaccggaaaacccaagaaactgctgtcgccatgcatgttgctgccaactctatccaaaacaggccgccaggctaccccaatatgaatcaagggggcatgatgggaactggacctccttatggacaagggattaatagtatggctggcatgatcaaccctcagggacccccatattccatgggtggaaccatggccaacaattctgcagggatggcagccagcccagagatgatgggccttggggatgtaaagttaactccagccaccaaaatgaacaacaaggcagatgggacacccaagacagaatccaaatccaagaaatccagttcttctactacaaccaatgagaagatcaccaagttgtatgagctgggtggtgagcctgagaggaagatgtgggtggaccgttatctggccttcactgaggagaaggccatgggcatgacaaatctgcctgctgtgggtaggaaacctctggacctctatcgcctctatgtgtctgtgaaggagattggtggattgactcaggtcaacaagaacaaaaaatggcgggaacttgcaaccaacctcaatgtgggcacatcaagcagtgctgccagctccttgaaaaagcagtatatccagtgtctctatgcctttgaatgcaagattgaacggggagaagaccctcccccagacatctttgcagctgctgattccaagaagtcccagcccaagatccagcctccctctcctgcgggatcaggatctatgcaggggccccagactccccagtcaaccagcagttccatggcagaaggaggagacttaaagccaccaactccagcatccacaccacacagtcagatccccccattgccaggcatgagcaggagcaattcagttgggatccaggatgcctttaatgatggaagtgactccacattccagaagcggaattccatgactccaaaccctgggtatcagcccagtatgaatacctctgacatgatggggcgcatgtcctatgagccaaataaggatccttatggcagcatgaggaaagctccagggagtgatcccttcatgtcctcagggcagggccccaacggcgggatgggtgacccctacagtcgtgctgccggccctgggctaggaaatgtggcgatgggaccacgacagcactatccctatggaggtccttatgacagagtgaggacggagcctggaatagggcctgagggaaacatgagcactggggccccacagccgaatctcatgccttccaacccagactcggggatgtattctcctagccgctaccccccgcagcagcagcagcagcagcagcaacgacatgattcctatggcaatcagttctccacccaaggcaccccttctggcagccccttccccagccagcagactacaatgtatcaacagcaacagcagaattacaagcggccaatggatggcacatatggccctcctgccaagcggcacgaaggggagatgtacagcgtgccatacagcactgggcaggggcagcctcagcagcagcagttgcccccagcccagccccagcctgccagccagcaacaagctgcccagccttcccctcagcaagatgtatacaaccagtatggcaatgcctatcctgccactgccacagctgctactgagcgccgaccagcaggcggcccccagaaccaatttccattccagtttggccgagaccgtgtctctgcaccccctggcaccaatgcccagcaaaacatgccaccacaaatgatgggcggccccatacaggcatcagctgaggttgctcagcaaggcaccatgtggcaggggcgtaatgacatgacctataattatgccaacaggcagagcacgggctctgccccccagggccccgcctatcatggcgtgaaccgaacagatgaaatgctgcacacagatcagagggccaaccacgaaggctcgtggccttcccatggcacacgccagcccccatatggtccctctgcccctgtgccccccatgacaaggccccctccatctaactaccagcccccaccaagcatgcagaatcacattcctcaggtatccagccctgctcccctgccccggccaatggagaaccgcacctctcctagcaagtctccattcctgcactctgggatgaaaatgcagaaggcaggtcccccagtacctgcctcgcacatagcacctgcccctgtgcagccccccatgattcggcgggatatcaccttcccacctggctctgttgaagccacacagcctgtgttgaagcagaggaggcggctcacaatgaaagacattggaaccccggaggcatggcgggtaatgatgtccctcaagtctggtctcctggcagagagcacatgggcattagataccatcaacatcctgctgtatgatgacaacagcatcatgaccttcaacctcagtcagctcccagggttgctagagctccttgtagaatatttccgacgatgcctgattgagatctttggcattttaaaggagtatgaggtgggtgacccaggacagagaacgctactggatcctgggaggttcagcaaggtgtctagtccagctcccatggagggtggggaagaagaagaagaactttaggtcctaaactagaagaggaagaagaagaggaagtagttgaaaatgatgaggagatagccttttcaggcaaggacaagccagcttcagagaatagtgaggagaagctgatcagtaagtttgacaagcttccagtaaagatcgtacagaagaatgatccatttgtggtggactgctcagataagcttgggcgtgtgcaggagtttgacagtggcctgctgcactggcggattggtgggggggacaccactgagcatatccagacccacttcgagagcaagacagagctgctgccttcccggcctcacgcaccctgcccaccagcccctcggaagcatgtgacaacagcagagggtacaccagggacaacagaccaggaggggcccccacctgatggacctccagaaaaacggatcacagccactatggatgacatgttgtctactcggtctagcaccttgaccgaggatggagctaagagttcagaggccatcaaggagagcagcaagtttccatttggcattagcccagcacagagccaccggaacatcaagatcctagaggacgaaccccacagtaaggatgagaccccactgtgtacccttctggactggcaggattctcttgccaagcgctgcgtctgtgtgtccaataccattcgaagcctgtcatttgtgccaggcaatgactttgagatgtccaaacacccagggctgctgctcatcctgggcaagctgatcctgctgcaccacaagcacccagaacggaagcaggcaccactaacttatgaaaaggaggaggaacaggaccaaggggtgagctgcaacaaagtggagtggtggtgggactgcttggagatgctccgggaaaacaccttggttacactcgccaacatctcggggcagttggacctatctccataccccgagagcatttgcctgcctgtcctggacggactcctacactgggcagtttgcccttcagctgaagcccaggaccccttttccaccctgggccccaatgccgtcctttccccgcagagactggtcttggaaaccctcagcaaactcagcatccaggacaacaatgtggacctgattctggccacaccccccttcagccgcctggagaagttgtatagcactatggtgcgcttcctcagtgaccgaaagaacccggtgtgccgggagatggctgtggtactgctggccaacctggctcagggggacagcctggcagctcgtgccattgcagtgcagaagggcagtatcggcaacctcctgggcttcctagaggacagccttgccgccacacagttccagcagagccaggccagcctcctccacatgcagaacccaccctttgagccaactagtgtggacatgatgcggcgggctgcccgcgcgctgcttgccttggccaaggtggacgagaaccactcagagtttactctgtacgaatcacggctgttggacatctcggtatcaccgttgatgaactcattggtttcacaagtcatttgtgatgtactgtttttgattggccagtcatgacagccgtgggacacctcccccccccgtgtgtgtgtgcgtgtgtggagaacttagaaactgactgttgccctttatttatgcaaaaccacctcagaatccagtttaccctgtgctgtccagcttctcccttgggaaaaagtctctcctgtttctctctcctccttccacctcccctccctccatcacctcacgcctttctgttccttgtcctcaccttactcccctcaggaccctaccccaccctctttgaaaagacaaagctctgcctacatagaagactttttttattttaaccaaagttactgttgtttacagtgagtttggggaaaaaaaataaaataaaaatggctttcccagtccttgcatcaacgggatgccacatttcataactgtttttaatggtaaaaaaaaaaaaaaaaaatacaaaaaaaaattctgaaggacaaaaaaggtgactgctgaactgtgtgtggtttattgttgtacattcacaatcttgcaggagccaagaagttcgcagttgtgaacagaccctgttcactggagaggcctgtgcagtagagtgtagaccctttcatgtactgtactgtacacctgatactgtaaacatactgtaataataatgtctcacatggaaacagaaaacgctgggtcagcagcaagctgtagtttttaaaaatgtttttagttaaacgttgaggagaaaaaaaaaaaaggcttttcccccaaagtatcatgtgtgaacctacaacaccctgacctctttctctcctccttgattgtatgaataaccctgagatcacctcttagaactggttttaacctttagctgcagcggctacgctgccacgtgtgtatatatatgacgttgtacattgcacatacccttggatccccacagtttggtcctcctcccagctacccctttatagtatgacgagttaacaagttggtgacctgcacaaagcgagacacagctatttaatctcttgccagatatcgcccctcttggtgcgatgctgtacaggtctctgtaaaaagtccttgctgtctcagcagccaatcaacttatagtttatttttttctgggtttttgttttgttttgttttctttctaatcgaggtgtgaaaaagttctaggttcagttgaagttctgatgaagaaacacaattgagattttttcagtgataaaatctgcatatttgtatttcaacaatgtagctaaaacttgatgtaaattcctcctttttttccttttttggcttaatgaatatcatttattcagtatgaaatctttatactatatgttccacgtgttaagaataaatgtacattaaatcttggtaagacttt

SEQ ID NO: 33 - DNA, 8585 bp, Homo sapiens
cagaaagcggagagtcacagcggggccaggccctggggagcggagcctccaccgcccccctcattcccaggcaagggcttggggggaatgagccgggagagccgggtcccgagcctacagagccgggagcagctgagccgccggcgcctcggccgccgccgccgcctcctcctcctccgccgccgccagcccggagcctgagccggcggggcgggggggagaggagcgagcgcagcgcagcagcggagccccgcgaggcccgcccgggcgggtggggagggcagcccgggggactgggccccggggcggggtgggagggggggagaagacgaagacagggccgggtctctccgcggacgagacagcggggatcatggccgcgcaggtcgcccccgccgccgccagcagcctgggcaacccgccgccgccgccgccctcggagctgaagaaagccgagcagcagcagcgggaggaggcggggggcgaggcggcggcggcggcagcggccgagcgcggggaaatgaaggcagccgccgggcaggaaagcgagggccccgccgtggggccgccgcagccgctgggaaaggagctgcaggacggggccgagagcaatgggggtggcggcggcggcggagccggcagcggcggcgggcccggcgcggagccggacctgaagaactcgaacgggaacgcgggccctaggcccgccctgaacaataacctcacggagccgcccggcggcggcggtggcggcagcagcgatggggtgggggcgcctcctcactcagccgcggccgccttgccgcccccagcctacggcttcgggcaaccctacggccggagcccgtctgccgtcgccgccgccgcggccgccgtcttccaccaacaacatggcggacaacaaagccctggcctggcagcgctgcagagcggcggcggcgggggcctggagccctacgcggggccccagcagaactctcacgaccacggcttccccaaccaccagtacaactcctactaccccaaccgcagcgcctaccccccgcccgccccggcctacgcgctgagctccccgagaggtggcactccgggctccggcgcggcggcggctgccggctccaagccgcctccctcctccagcgcctccgcctcctcgtcgtcttcgtccttcgctcagcagcgcttcggggccatggggggaggcggcccctccgcggccggcgggggaactccccagcccaccgccacccccaccctcaaccaactgctcacgtcgcccagctcggcccggggctaccagggctaccccgggggcgactacagtggcgggccccaggacgggggcgccggcaagggcccggcggacatggcctcgcagtgttggggggctgcggcggcggcagctgcggcggcggccgcctcgggaggggcccaacaaaggagccaccacgcgcccatgagccccgggagcagcggcggcggggggcagccgctcgcccggacccctcagccatccagtccaatggatcagatgggcaagatgagacctcagccatatggcgggactaacccatactcgcagcaacagggacctccgtcaggaccgcagcaaggacatgggtacccagggcagccatacgggtcccagaccccgcagcggtacccgatgaccatgcagggccgggcgcagagtgccatgggcggcctctcttatacacagcagattcctccttatggacaacaaggccccagcgggtatggtcaacagggccagactccatattacaaccagcaaagtcctcaccctcagcagcagcagccaccctactcccagcaaccaccgtcccagacccctcatgcccaaccttcgtatcagcagcagccacagtctcaaccaccacagctccagtcctctcagcctccatactcccagcagccatcccagcctccacatcagcagtccccggctccatacccctcccagcagtcgacgacacagcagcacccccagagccagcccccctactcacagccacaggctcagtctccttaccagcagcagcaacctcagcagccagcaccctcgacgctctcccagcaggctgcgtatcctcagccccagtctcagcagtcccagcaaactgcctattcccagcagcgcttccctccaccgcaggagctatctcaagattcatttgggtctcaggcatcctcagccccctcaatgacctccagtaagggagggcaagaagatatgaacctgagccttcagtcaagaccctccagcttgcctgatctatctggttcaatagatgacctccccatggggacagaaggagctctgagtcctggagtgagcacatcagggatttccagcagccaaggagagcagagtaatccagctcagtctcctttctctcctcatacctcccctcacctgcctggcatccgaggcccttccccgtcccctgttggctctcccgccagtgttgctcagtctcgctcaggaccactctcgcctgctgcagtgccaggcaaccagatgccacctcggccacccagtggccagtcggacagcatcatgcatccttccatgaaccaatcaagcattgcccaagatcgaggttatatgcagaggaacccccagatgccccagtacagttccccccagcccggctcagccttatctccgcgtcagccttccggaggacagatacacacaggcatgggctcctaccagcagaactccatggggagctatggtccccaggggggtcagtatggcccacaaggtggctaccccaggcagccaaactataatgccttgcccaatgccaactaccccagtgcaggcatggctggaggcataaaccccatgggtgccggaggtcaaatgcatggacagcctggcatcccaccttatggcacactccctccagggaggatgagtcacgcctccatgggcaaccggccttatggccctaacatggccaatatgccacctcaggttgggtcagggatgtgtcccccaccagggggcatgaaccggaaaacccaagaaactgctgtcgccatgcatgttgctgccaactctatccaaaacaggccgccaggctaccccaatatgaatcaagggggcatgatgggaactggacctccttatggacaagggattaatagtatggctggcatgatcaaccctcagggacccccatattccatgggtggaaccatggccaacaattctgcagggatggcagccagcccagagatgatgggccttggggatgtaaagttaactccagccaccaaaatgaacaacaaggcagatgggacacccaagacagaatccaaatccaagaaatccagttcttctactacaaccaatgagaagatcaccaagttgtatgagctgggtggtgagcctgagaggaagatgtgggtggaccgttatctggccttcactgaggagaaggccatgggcatgacaaatctgcctgctgtgggtaggaaacctctggacctctatcgcctctatgtgtctgtgaaggagattggtggattgactcaggtcaacaagaacaaaaaatggcgggaacttgcaaccaacctcaatgtgggcacatcaagcagtgctgccagctccttgaaaaagcagtatatccagtgtctctatgcctttgaatgcaagattgaacggggagaagaccctcccccagacatctttgcagctgctgattccaagaagtcccagcccaagatccagcctccctctcctgcgggatcaggatctatgcaggggccccagactccccagtcaaccagcagttccatggcagaaggaggagacttaaagccaccaactccagcatccacaccacacagtcagatccccccattgccaggcatgagcaggagcaattcagttgggatccaggatgcctttaatgatggaagtgactccacattccagaagcggaattccatgactccaaaccctgggtatcagcccagtatgaatacctctgacatgatggggcgcatgtcctatgagccaaataaggatccttatggcagcatgaggaaagctccagggagtgatcccttcatgtcctcagggcagggccccaacggcgggatgggtgacccctacagtcgtgctgccggccctgggctaggaaatgtggcgatgggaccacgacagcactatccctatggaggtccttatgacagagtgaggacggagcctggaatagggcctgagggaaacatgagcactggggccccacagccgaatctcatgccttccaacccagactcggggatgtattctcctagccgctaccccccgcagcagcagcagcagcagcagcaacgacatgattcctatggcaatcagttctccacccaaggcaccccttctggcagccccttccccagccagcagactacaatgtatcaacagcaacagcagaattacaagcggccaatggatggcacatatggccctcctgccaagcggcacgaaggggagatgtacagcgtgccatacagcactgggcaggggcagcctcagcagcagcagttgcccccagcccagccccagcctgccagccagcaacaagctgcccagccttcccctcagcaagatgtatacaaccagtatggcaatgcctatcctgccactgccacagctgctactgagcgccgaccagcaggcggcccccagaaccaatttccattccagtttggccgagaccgtgtctctgcaccccctggcaccaatgcccagcaaaacatgccaccacaaatgatgggcggccccatacaggcatcagctgaggttgctcagcaaggcaccatgtggcaggggcgtaatgacatgacctataattatgccaacaggcagagcacgggctctgccccccagggccccgcctatcatggcgtgaaccgaacagatgaaatgctgcacacagatcagagggccaaccacgaaggctcgtggccttcccatggcacacgccagcccccatatggtccctctgcccctgtgccccccatgacaaggccccctccatctaactaccagcccccaccaagcatgcagaatcacattcctcaggtatccagccctgctcccctgccccggccaatggagaaccgcacctctcctagcaagtctccattcctgcactctgggatgaaaatgcagaaggcaggtcccccagtacctgcctcgcacatagcacctgcccctgtgcagccccccatgattcggcgggatatcaccttcccacctggctctgttgaagccacacagcctgtgttgaagcagaggaggcggctcacaatgaaagacattggaaccccggaggcatggcgggtaatgatgtccctcaagtctggtctcctggcagagagcacatgggcattagataccatcaacatcctgctgtatgatgacaacagcatcatgaccttcaacctcagtcagctcccagggttgctagagctccttgtagaatatttccgacgatgcctgattgagatctttggcattttaaaggagtatgaggtgggtgacccaggacagagaacgctactggatcctgggaggttcagcaaggtgtctagtccagctcccatggagggtggggaagaagaagaagaacttctaggtcctaaactagaagaggaagaagaagaggaagtagttgaaaatgatgaggagatagccttttcaggcaaggacaagccagcttcagagaatagtgaggagaagctgatcagtaagtttgacaagcttccagtaaagatcgtacagaagaatgatccatttgtggtggactgctcagataagcttgggcgtgtgcaggagtttgacagtggcctgctgcactggcggattggtgggggggacaccactgagcatatccagacccacttcgagagcaagacagagctgctgccttcccggcctcacgtaccctgcccaccagcccctcggaagcatgtgacaacagcagagggtacaccagggacaacagaccaggaggggcccccacctgatggacctccagaaaaacggatcacagccactatggatgacatgttgtctactcggtctagcaccttgaccgaggatggagctaagagttcagaggccatcaaggagagcagcaagtttccatttggcattagcccagcacagagccaccggaacatcaagatcctagaggacgaaccccacagtaaggatgagaccccactgtgtacccttctggactggcaggattctcttgccaagcgctgcgtctgtgtgtccaataccattcgaagcctgtcatttgtgccaggcaatgactttgagatgtccaaacacccagggctgctgctcatcctgggcaagctgatcctgctgcaccacaagcacccagaacggaagcaggcaccactaacttatgaaaaggaggaggaacaggaccaaggggtgagctgcaacaaagtggagtggtggtgggactgcttggagatgctccgggaaaacaccttggttacactcgccaacatctcggggcagttggacctatctccataccccgagagcatttgcctgcctgtcctggacggactcctacactgggcagtttgcccttcagctgaagcccaggaccccttttccaccctgggccccaatgccgtcctttccccgcagagactggtcttggaaaccctcagcaaactcagcatccaggacaacaatgtggacctgattctggccacaccccccttcagccgcctggagaagttgtatagcactatggtgcgcttcctcagtgaccgaaagaacccggtgtgccgggagatggctgtggtactgctggccaacctggctcagggggacagcctggcagctcgtgccattgcagtgcagaagggcagtatcggcaacctcctgggcttcctagaggacagccttgccgccacacagttccagcagagccaggccagcctcctccacatgcagaacccaccctttgagccaactagtgtggacatgatgcggcgggctgcccgcgcgctgcttgccttggccaaggtggacgagaaccactcagagtttactctgtacgaatcacggctgttggacatctcggtatcaccgttgatgaactcattggtttcacaagtcatttgtgatgtactgtttttgattggccagtcatgacagccgtgggacacctcccccccccgtgtgtgtgtgcgtgtgtggagaacttagaaactgactgttgccctttatttatgcaaaaccacctcagaatccagtttaccctgtgctgtccagcttctcccttgggaaaaagtctctcctgtttctctctcctccttccacctcccctccctccatcacctcacgcctttctgttccttgtcctcaccttactcccctcaggaccctaccccaccctctttgaaaagacaaagctctgcctacatagaagactttttttattttaaccaaagttactgttgtttacagtgagtttggggaaaaaaaataaaataaaaatggctttcccagtccttgcatcaacgggatgccacatttcataactgtttttaatggtaaaaaaaaaaaaaaaaaatacaaaaaaaaattctgaaggacaaaaaaggtgactgctgaactgtgtgtggtttattgttgtacattcacaatcttgcaggagccaagaagttcgcagttgtgaacagaccctgttcactggagaggcctgtgcagtagagtgtagaccctttcatgtactgtactgtacacctgatactgtaaacatactgtaataataatgtctcacatggaaacagaaaacgctgggtcagcagcaagctgtagtttttaaaaatgtttttagttaaacgttgaggagaaaaaaaaaaaaggcttttcccccaaagtatcatgtgtgaacctacaacaccctgacctctttctctcctccttgattgtatgaataaccctgagatcacctcttagaactggttttaacctttagctgcagcggctacgctgccacgtgtgtatatatatgacgttgtacattgcacatacccttggatccccacagtttggtcctcctcccagctacccctttatagtatgacgagttaacaagttggtgacctgcacaaagcgagacacagctatttaatctcttgccagatatcgcccctcttggtgcgatgctgtacaggtctctgtaaaaagtccttgctgtctcagcagccaatcaacttatagtttatttttttctgggtttttgttttgttttgttttctttctaatcgaggtgtgaaaaagttctaggttcagttgaagttctgatgaagaaacacaattgagattttttcagtgataaaatctgcatatttgtatttcaacaatgtagctaaaacttgatgtaaattcctcctttttttccttttttggcttaatgaatatcatttattcagtatgaaatctttatactatatgttccacgtgttaagaataaatgtacattaaatcttggtaagacttt

SEQ ID NO: 34 - DNA, 8584 bp, Homo sapiens
cagaaagcggagagtcacagcggggccaggccctggggagcggagcctccaccgcccccctcattcccaggcaagggcttggggggaatgagccgggagagccgggtcccgagcctacagagccgggagcagctgagccgccggcgcctcggccgccgccgccgcctcctcctcctccgccgccgccagcccggagcctgagccggcggggcgggggggagaggagcgagcgcagcgcagcagcggagccccgcgaggcccgcccgggcgggtggggagggcagcccgggggactgggccccggggcggggtgggagggggggagaagacgaagacagggccgggtctctccgcggacgagacagcggggatcatggccgcgcaggtcgcccccgccgccgccagcagcctgggcaacccgccgccgccgccgccctcggagctgaagaaagccgagcagcagcagcgggaggaggcggggggcgaggcggcggcggcggcagcggccgagcgcggggaaatgaaggcagccgccgggcaggaaagcgagggccccgccgtggggccgccgcagccgctgggaaaggagctgcaggacggggccgagagcaatgggggtggcggcggcggcggagccggcagcggcggcgggcccggcgcggagccggacctgaagaactcgaacgggaacgcgggccctaggcccgccctgaacaataacctcacggagccgcccggcggcggcggtggcggcagcagcgatggggtgggggcgcctcctcactcagccgcggccgccttgccgcccccagcctacggcttcgggcaaccctacggccggagcccgtctgccgtcgccgccgccgcggccgccgtcttccaccaacaacatggcggacaacaaagccctggcctggcagcgctgcagagcggcggcggcgggggcctggagccctacgcggggccccagcagaactctcacgaccacggcttccccaaccaccagtacaactcctactaccccaaccgcagcgcctaccccccgcccgccccggcctacgcgctgagctccccgagaggtggcactccgggctccggcgcggcggcggctgccggctccaagccgcctccctcctccagcgcctccgcctcctcgtcgtcttcgtccttcgctcagcagcgcttcggggccatggggggaggcggcccctccgcggccggcgggggaactccccagcccaccgccacccccaccctcaaccaactgctcacgtcgcccagctcggcccggggctaccagggctaccccgggggcgactacagtggcgggccccaggacgggggcgccggcaagggcccggcggacatggcctcgcagtgttggggggctgcggcggcggcagctgcggcggcggccgcctcgggaggggcccaacaaaggagccaccacgcgcccatgagccccgggagcagcggcggcggggggcagccgctcgcccggacccctcagccatccagtccaatggatcagatgggcaagatgagacctcagccatatggcgggactaacccatactcgcagcaacagggacctccgtcaggaccgcagcaaggacatgggtacccagggcagccatacgggtcccagaccccgcagcggtacccgatgaccatgcagggccgggcgcagagtgccatgggcggcctctcttatacacagcagattcctccttatggacaacaaggccccagcgggtatggtcaacagggccagactccatattacaaccagcaaagtcctcaccctcagcagcagcagccaccctactcccagcaaccaccgtcccagacccctcatgcccaaccttcgtatcagcagcagccacagtctcaaccaccacagctccagtcctctcagcctccatactcccagcagccatcccagcctccacatcagcagtccccggctccatacccctcccagcagtcgacgacacagcagcacccccagagccagcccccctactcacagccacaggctcagtctccttaccagcagcagcaacctcagcagccagcaccctcgacgctctcccagcaggctgcgtatcctcagccccagtctcagcagtcccagcaaactgcctattcccagcagcgcttccctccaccgcaggagctatctcaagattcatttgggtctcaggcatcctcagccccctcaatgacctccagtaagggagggcaagaagatatgaacctgagccttcagtcaagaccctccagcttgcctgatctatctggttcaatagatgacctccccatggggacagaaggagctctgagtcctggagtgagcacatcagggatttccagcagccaaggagagcagagtaatccagctcagtctcctttctctcctcatacctcccctcacctgcctggcatccgaggcccttccccgtcccctgttggctctcccgccagtgttgctcagtctcgctcaggaccactctcgcctgctgcagtgccaggcaaccagatgccacctcggccacccagtggccagtcggacagcatcatgcatccttccatgaaccaatcaagcattgcccaagatcgaggttatatgcagaggaacccccagatgccccagtacagttccccccagcccggctcagccttatctccgcgtcagccttccggaggacagatacacacaggcatgggctcctaccagcagaactccatggggagctatggtccccaggggggtcagtatggcccacaaggtggctaccccaggcagccaaactataatgccttgcccaatgccaactaccccagtgcaggcatggctggaggcataaaccccatgggtgccggaggtcaaatgcatggacagcctggcatcccaccttatggcacactccctccagggaggatgagtcacgcctccatgggcaaccggccttatggccctaacatggccaatatgccacctcaggttgggtcagggatgtgtcccccaccagggggcatgaaccggaaaacccaagaaactgctgtcgccatgcatgttgctgccaactctatccaaaacaggccgccaggctaccccaatatgaatcaagggggcatgatgggaactggacctccttatggacaagggattaatagtatggctggcatgatcaaccctcagggacccccatattccatgggtggaaccatggccaacaattctgcagggatggcagccagcccagagatgatgggccttggggatgtaaagttaactccagccaccaaaatgaacaacaaggcagatgggacacccaagacagaatccaaatccaagaaatccagttcttctactacaaccaatgagaagatcaccaagttgtatgagctgggtggtgagcctgagaggaagatgtgggtggaccgttatctggccttcactgaggagaaggccatgggcatgacaaatctgcctgctgtgggtaggaaacctctggacctctatcgcctctatgtgtctgtgaaggagattggtggattgactcaggtcaacaagaacaaaaaatggcgggaacttgcaaccaacctcaatgtgggcacatcaagcagtgctgccagctccttgaaaaagcagtatatccagtgtctctatgcctttgaatgcaagattgaacggggagaagaccctcccccagacatctttgcagctgctgattccaagaagtcccagcccaagatccagcctccctctcctgcgggatcaggatctatgcaggggccccagactccccagtcaaccagcagttccatggcagaaggaggagacttaaagccaccaactccagcatccacaccacacagtcagatccccccattgccaggcatgagcaggagcaattcagttgggatccaggatgcctttaatgatggaagtgactccacattccagaagcggaattccatgactccaaaccctgggtatcagcccagtatgaatacctctgacatgatggggcgcatgtcctatgagccaaataaggatccttatggcagcatgaggaaagctccagggagtgatcccttcatgtcctcagggcagggccccaacggcgggatgggtgacccctacagtcgtgctgccggccctgggctaggaaatgtggcgatgggaccacgacagcactatccctatggaggtccttatgacagagtgaggacggagcctggaatagggcctgagggaaacatgagcactggggccccacagccgaatctcatgccttccaacccagactcggggatgtattctcctagccgctaccccccgcagcagcagcagcagcagcagcaacgacatgattcctatggcaatcagttctccacccaaggcaccccttctggcagccccttccccagccagcagactacaatgtatcaacagcaacagcagaattacaagcggccaatggatggcacatatggccctcctgccaagcggcacgaaggggagatgtacagcgtgccatacagcactgggcaggggcagcctcagcagcagcagttgcccccagcccagccccagcctgccagccagcaacaagctgcccagccttcccctcagcaagatgtatacaaccagtatggcaatgcctatcctgccactgccacagctgctactgagcgccgaccagcaggcggcccccagaaccaatttccattccagtttggccgagaccgtgtctctgcaccccctggcaccaatgcccagcaaaacatgccaccacaaatgatgggcggccccatacaggcatcagctgaggttgctcagcaaggcaccatgtggcaggggcgtaatgacatgacctataattatgccaacaggcagagcacgggctctgccccccagggccccgcctatcatggcgtgaaccgaacagatgaaatgctgcacacagatcagagggccaaccacgaaggctcgtggccttcccatggcacacgccagcccccatatggtccctctgcccctgtgccccccatgacaaggccccctccatctaactaccagcccccaccaagcatgcagaatcacattcctcaggtatccagccctgctcccctgccccggccaatggagaaccgcacctctcctagcaagtctccattcctgcactctgggatgaaaatgcagaaggcaggtcccccagtacctgcctcgcacatagcacctgcccctgtgcagccccccatgattcggcgggatatcaccttcccacctggctctgttgaagccacacagcctgtgttgaagcagaggaggcggctcacaatgaaagacattggaacccggaggcatggcgggtaatgatgtccctcaagtctggtctcctggcagagagcacatgggcattagataccatcaacatcctgctgtatgatgacaacagcatcatgaccttcaacctcagtcagctcccagggttgctagagctccttgtagaatatttccgacgatgcctgattgagatctttggcattttaaaggagtatgaggtgggtgacccaggacagagaacgctactggatcctgggaggttcagcaaggtgtctagtccagctcccatggagggtggggaagaagaagaagaacttctaggtcctaaactagaagaggaagaagaagaggaagtagttgaaaatgatgaggagatagccttttcaggcaaggacaagccagcttcagagaatagtgaggagaagctgatcagtaagtttgacaagcttccagtaaagatcgtacagaagaatgatccatttgtggtggactgctcagataagcttgggcgtgtgcaggagtttgacagtggcctgctgcactggcggattggtgggggggacaccactgagcatatccagacccacttcgagagcaagacagagctgctgccttcccggcctcacgcaccctgcccaccagcccctcggaagcatgtgacaacagcagagggtacaccagggacaacagaccaggaggggcccccacctgatggacctccagaaaaacggatcacagccactatggatgacatgttgtctactcggtctagcaccttgaccgaggatggagctaagagttcagaggccatcaaggagagcagcaagtttccatttggcattagcccagcacagagccaccggaacatcaagatcctagaggacgaaccccacagtaaggatgagaccccactgtgtacccttctggactggcaggattctcttgccaagcgctgcgtctgtgtgtccaataccattcgaagcctgtcatttgtgccaggcaatgactttgagatgtccaaacacccagggctgctgctcatcctgggcaagctgatcctgctgcaccacaagcacccagaacggaagcaggcaccactaacttatgaaaaggaggaggaacaggaccaaggggtgagctgcaacaaagtggagtggtggtgggactgcttggagatgctccgggaaaacaccttggttacactcgccaacatctcggggcagttggacctatctccataccccgagagcatttgcctgcctgtcctggacggactcctacactgggcagtttgcccttcagctgaagcccaggaccccttttccaccctgggccccaatgccgtcctttccccgcagagactggtcttggaaaccctcagcaaactcagcatccaggacaacaatgtggacctgattctggccacaccccccttcagccgcctggagaagttgtatagcactatggtgcgcttcctcagtgaccgaaagaacccggtgtgccgggagatggctgtggtactgctggccaacctggctcagggggacagcctggcagctcgtgccattgcagtgcagaagggcagtatcggcaacctcctgggcttcctagaggacagccttgccgccacacagttccagcagagccaggccagcctcctccacatgcagaacccaccctttgagccaactagtgtggacatgatgcggcgggctgcccgcgcgctgcttgccttggccaaggtggacgagaaccactcagagtttactctgtacgaatcacggctgttggacatctcggtatcaccgttgatgaactcattggtttcacaagtcatttgtgatgtactgtttttgattggccagtcatgacagccgtgggacacctcccccccccgtgtgtgtgtgcgtgtgtggagaacttagaaactgactgttgccctttatttatgcaaaaccacctcagaatccagtttaccctgtgctgtccagcttctcccttgggaaaaagtctctcctgtttctctctcctccttccacctcccctccctccatcacctcacgcctttctgttccttgtcctcaccttactcccctcaggaccctaccccaccctctttgaaaagacaaagctctgcctacatagaagactttttttattttaaccaaagttactgttgtttacagtgagtttggggaaaaaaaataaaataaaaatggctttcccagtccttgcatcaacgggatgccacatttcataactgtttttaatggtaaaaaaaaaaaaaaaaaatacaaaaaaaaattctgaaggacaaaaaaggtgactgctgaactgtgtgtggtttattgttgtacattcacaatcttgcaggagccaagaagttcgcagttgtgaacagaccctgttcactggagaggcctgtgcagtagagtgtagaccctttcatgtactgtactgtacacctgatactgtaaacatactgtaataataatgtctcacatggaaacagaaaacgctgggtcagcagcaagctgtagtttttaaaaatgtttttagttaaacgttgaggagaaaaaaaaaaaaggcttttcccccaaagtatcatgtgtgaacctacaacaccctgacctctttctctcctccttgattgtatgaataaccctgagatcacctcttagaactggttttaacctttagctgcagcggctacgctgccacgtgtgtatatatatgacgttgtacattgcacatacccttggatccccacagtttggtcctcctcccagctacccctttatagtatgacgagttaacaagttggtgacctgcacaaagcgagacacagctatttaatctcttgccagatatcgcccctcttggtgcgatgctgtacaggtctctgtaaaaagtccttgctgtctcagcagccaatcaacttatagtttatttttttctgggtttttgttttgttttgttttctttctaatcgaggtgtgaaaaagttctaggttcagttgaagttctgatgaagaaacacaattgagattttttcagtgataaaatctgcatatttgtatttcaacaatgtagctaaaacttgatgtaaattcctcctttttttccttttttggcttaatgaatatcatttattcagtatgaaatctttatactatatgttccacgtgttaagaataaatgtacattaaatcttggtaagacttt

SEQ ID NO: 35 - DNA, 8585 bp, Homo sapiens
cagaaagcggagagtcacagcggggccaggccctggggagcggagcctccaccgcccccctcattcccaggcaagggcttggggggaatgagccgggagagccgggtcccgagcctacagagccgggagcagctgagccgccggcgcctcggccgccgccgccgcctcctcctcctccgccgccgccagcccggagcctgagccggcggggcgggggggagaggagcgagcgcagcgcagcagcggagccccgcgaggcccgcccgggcgggtggggagggcagcccgggggactgggccccggggcggggtgggagggggggagaagacgaagacagggccgggtctctccgcggacgagacagcggggatcatggccgcgcaggtcgcccccgccgccgccagcagcctgggcaacccgccgccgccgccgccctcggagctgaagaaagccgagcagcagcagcgggaggaggcggggggcgaggcggcggcggcggcagcggccgagcgcggggaaatgaaggcagccgccgggcaggaaagcgagggccccgccgtggggccgccgcagccgctgggaaaggagctgcaggacggggccgagagcaatgggggtggcggcggcggcggagccggcagcggcggcgggcccggcgcggagccggacctgaagaactcgaacgggaacgcgggccctaggcccgccctgaacaataacctcacggagccgcccggcggcggcggtggcggcagcagcgatggggtgggggcgcctcctcactcagccgcggccgccttgccgcccccagcctacggcttcgggcaaccctacggccggagcccgtctgccgtcgccgccgccgcggccgccgtcttccaccaacaacatggcggacaacaaagccctggcctggcagcgctgcagagcggcggcggcgggggcctggagccctacgcggggccccagcagaactctcacgaccacggcttccccaaccaccagtacaactcctactaccccaaccgcagcgcctaccccccgcccgccccggcctacgcgctgagctccccgagaggtggcactccgggctccggcgcggcggcggctgccggctccaagccgcctccctcctccagcgcctccgcctcctcgtcgtcttcgtccttcgctcagcagcgcttcggggccatggggggaggcggcccctccgcggccggcgggggaactccccagcccaccgccacccccaccctcaaccaactgctcacgtcgcccagctcggcccggggctaccagggctaccccgggggcgactacagtggcgggccccaggacgggggcgccggcaagggcccggcggacatggcctcgcagtgttggggggctgcggcggcggcagctgcggcggcggccgcctcgggaggggcccaacaaaggagccaccacgcgcccatgagccccgggagcagcggcggcggggggcagccgctcgcccggacccctcagccatccagtccaatggatcagatgggcaagatgagacctcagccatatggcgggactaacccatactcgcagcaacagggacctccgtcaggaccgcagcaaggacatgggtacccagggcagccatacgggtcccagaccccgcagcggtacccgatgaccatgcagggccgggcgcagagtgccatgggcggcctctcttatacacagcagattcctccttatggacaacaaggccccagcgggtatggtcaacagggccagactccatattacaaccagcaaagtcctcaccctcagcagcagcagccaccctactcccagcaaccaccgtcccagacccctcatgcccaaccttcgtatcagcagcagccacagtctcaaccaccacagctccagtcctctcagcctccatactcccagcagccatcccagcctccacatcagcagtccccggctccatacccctcccagcagtcgacgacacagcagcacccccagagccagcccccctactcacagccacaggctcagtctccttaccagcagcagcaacctcagcagccagcaccctcgacgctctcccagcaggctgcgtatcctcagccccagtctcagcagtcccagcaaactgcctattcccagcagcgcttccctccaccgcaggagctatctcaagattcatttgggtctcaggcatcctcagccccctcaatgacctccagtaagggagggcaagaagatatgaacctgagccttcagtcaagaccctccagcttgcctgatctatctggttcaatagatgacctccccatggggacagaaggagctctgagtcctggagtgagcacatcagggatttccagcagccaaggagagcagagtaatccagctcagtctcctttctctcctcatacctcccctcacctgcctggcatccgaggcccttccccgtcccctgttggctctcccgccagtgttgctcagtctcgctcaggaccactctcgcctgctgcagtgccaggcaaccagatgccacctcggccacccagtggccagtcggacagcatcatgcatccttccatgaaccaatcaagcattgcccaagatcgaggttatatgcagaggaacccccagatgccccagtacagttccccccagcccggctcagccttatctccgcgtcagccttccggaggacagatacacacaggcatgggctcctaccagcagaactccatggggagctatggtccccaggggggtcagtatggcccacaaggtggctaccccaggcagccaaactataatgccttgcccaatgccaactaccccagtgcaggcatggctggaggcataaaccccatgggtgccggaggtcaaatgcatggacagcctggcatcccaccttatggcacactccctccagggaggatgagtcacgcctccatgggcaaccggccttatggccctaacatggccaatatgccacctcaggttgggtcagggatgtgtcccccaccagggggcatgaaccggaaaacccaagaaactgctgtcgccatgcatgttgctgccaactctatccaaaacaggccgccaggctaccccaatatgaatcaagggggcatgatgggaactggacctccttatggacaagggattaatagtatggctggcatgatcaaccctcagggacccccatattccatgggtggaaccatggccaacaattctgcagggatggcagccagcccagagatgatgggccttggggatgtaaagttaactccagccaccaaaatgaacaacaaggcagatgggacacccaagacagaatccaaatccaagaaatccagttcttctactacaaccaatgagaagatcaccaagttgtatgagctgggtggtgagcctgagaggaagatgtgggtggaccgttatctggccttcactgaggagaaggccatgggcatgacaaatctgcctgctgtgggtaggaaacctctggacctctatcgcctctatgtgtctgtgaaggagattggtggattgactcaggtcaacaagaacaaaaaatggcgggaacttgcaaccaacctcaatgtgggcacatcaagcagtgctgccagctccttgaaaaagcagtatatccagtgtctctatgcctttgaatgcaagattgaacggggagaagaccctcccccagacatctttgcagctgctgattccaagaagtcccagcccaagatccagcctccctctcctgcgggatcaggatctatgcaggggccccagactccccagtcaaccagcagttccatggcagaaggaggagacttaaagccaccaactccagcatccacaccacacagtcagatccccccattgccaggcatgagcaggagcaattcagttgggatccaggatgcctttaatgatggaagtgactccacattccagaagcggaattccatgactccaaaccctgggtatcagcccagtatgaatacctctgacatgatggggcgcatgtcctatgagccaaataaggatccttatggcagcatgaggaaagctccagggagtgatcccttcatgtcctcagggcagggccccaacggcgggatgggtgacccctacagtcgtgctgccggccctgggctaggaaatgtggcgatgggaccacgacagcactatccctatggaggtccttatgacagagtgaggacggagcctggaatagggcctgagggaaacatgagcactggggccccacagccgaatctcatgccttccaacccagactcggggatgtattctcctagccgctaccccccgcagcagcagcagcagcagcagcaacgacatgattcctatggcaatcagttctccacccaaggcaccccttctggcagccccttccccagccagcagactacaatgtatcaacagcaacagcagaattacaagcggccaatggatggcacatatggccctcctgccaagcggcacgaaggggagatgtacagcgtgccatacagcactgggcaggggcagcctcagcagcagcagttgcccccagcccagccccagcctgccagccagcaacaagctgcccagccttcccctcagcaagatgtatacaaccagtatggcaatgcctatcctgccactgccacagctgctactgagcgccgaccagcaggcggcccccagaaccaatttccattccagtttggccgagaccgtgtctctgcaccccctggcaccaatgcccagcaaaacatgccaccacaaatgatgggcggccccatacaggcatcagctgaggttgctcagcaaggcaccatgtggcaggggcgtaatgacatgacctataattatgccaacaggcagagcacgggctctgccccccagggccccgcctatcatggcgtgaaccgaacagatgaaatgctgcacacagatcagagggccaaccacgaaggctcgtggccttcccatggcacacgccagcccccatatggtccctctgcccctgtgccccccatgacaaggccccctccatctaactaccagcccccaccaagcatgcagaatcacattcctcaggtatccagccctgctcccctgccccggccaatggagaaccgcacctctcctagcaagtctccattcctgcactctgggatgaaaatgcagaaggcaggtcccccagtacctgcctcgcacatagcacctgcccctgtgcagccccccatgattcggcgggatatcaccttcccacctggctctgttgaagccacacagcctgtgttgaagcagaggaggcggctcacaatgaaagacattggaaccccggaggcatggcgggtaatgatgtccctcaagtctggtctcctggcagagagcacatgggcattagataccatcaacatcctgctgtatgatgacaacagcatcatgaccttcaacctcagtcagctcccagggttgctagagctccttgtagaatatttccgacgatgcctgattgagatctttggcattttaaaggagtatgaggtgggtgacccaggacagagaacgctactggatcctgggaggttcagcaaggtgtctagtccagctcccatggagggtggggaagaagaagaagaacttctaggtcctaaactagaagaggaagaagaagaggaagtagttgaaaatgatgaggagatagccttttcaggcaaggacaagccagcttcagagaatagtgaggagaagctgatcagtaagtttgacaagcttccagtaaagatcgtacagaagaatgatccatttgtggtggactgctcagataagcttgggcgtgtgcaggagtttgacagtggcctgctgcactggcggattggtgggggggacaccactgagcatatccagacccacttcgagagcaagacagagctgctgccttcccggcctcacgcaccctgcccaccagcccctcggaagcatgtgacaacagcagagggtacaccagggacaacagaccaggaggggcccccacctgatggacctccagaaaaacggatcacagccactatggatgacatgttgtctactcggtctagcaccttgaccgaggatggagctaagagttcagaggccatcaaggagagcagcaagtttccatttggcattagcccagcacagagccaccggaacatcaagatcctagaggacgaaccccacagtaaggatgagaccccactgtgtacccttctggactggcaggattctcttgccaagcgctgcgtctgtgtgtccaataccattcgaagcctgtcatttgtgccaggcaatgactttgagatgtccaaacacccagggctgctgctcatcctgggcaagctgatcctgctgcaccacaagcacccagaacggaagcaggcaccactaacttatgaaaaggaggaggaacaggaccaaggggtgagctgcaacaaagtgtagtggtggtgggactgcttggagatgctccgggaaaacaccttggttacactcgccaacatctcggggcagttggacctatctccataccccgagagcatttgcctgcctgtcctggacggactcctacactgggcagtttgcccttcagctgaagcccaggaccccttttccaccctgggccccaatgccgtcctttccccgcagagactggtcttggaaaccctcagcaaactcagcatccaggacaacaatgtggacctgattctggccacaccccccttcagccgcctggagaagttgtatagcactatggtgcgcttcctcagtgaccgaaagaacccggtgtgccgggagatggctgtggtactgctggccaacctggctcagggggacagcctggcagctcgtgccattgcagtgcagaagggcagtatcggcaacctcctgggcttcctagaggacagccttgccgccacacagttccagcagagccaggccagcctcctccacatgcagaacccaccctttgagccaactagtgtggacatgatgcggcgggctgcccgcgcgctgcttgccttggccaaggtggacgagaaccactcagagtttactctgtacgaatcacggctgttggacatctcggtatcaccgttgatgaactcattggtttcacaagtcatttgtgatgtactgtttttgattggccagtcatgacagccgtgggacacctcccccccccgtgtgtgtgtgcgtgtgtggagaacttagaaactgactgttgccctttatttatgcaaaaccacctcagaatccagtttaccctgtgctgtccagcttctcccttgggaaaaagtctctcctgtttctctctcctccttccacctcccctccctccatcacctcacgcctttctgttccttgtcctcaccttactcccctcaggaccctaccccaccctctttgaaaagacaaagctctgcctacatagaagactttttttattttaaccaaagttactgttgtttacagtgagtttggggaaaaaaaataaaataaaaatggctttcccagtccttgcatcaacgggatgccacatttcataactgtttttaatggtaaaaaaaaaaaaaaaaaatacaaaaaaaaattctgaaggacaaaaaaggtgactgctgaactgtgtgtggtttattgttgtacattcacaatcttgcaggagccaagaagttcgcagttgtgaacagaccctgttcactggagaggcctgtgcagtagagtgtagaccctttcatgtactgtactgtacacctgatactgtaaacatactgtaataataatgtctcacatggaaacagaaaacgctgggtcagcagcaagctgtagtttttaaaaatgtttttagttaaacgttgaggagaaaaaaaaaaaaggcttttcccccaaagtatcatgtgtgaacctacaacaccctgacctctttctctcctccttgattgtatgaataaccctgagatcacctcttagaactggttttaacctttagctgcagcggctacgctgccacgtgtgtatatatatgacgttgtacattgcacatacccttggatccccacagtttggtcctcctcccagctacccctttatagtatgacgagttaacaagttggtgacctgcacaaagcgagacacagctatttaatctcttgccagatatcgcccctcttggtgcgatgctgtacaggtctctgtaaaaagtccttgctgtctcagcagccaatcaacttatagtttatttttttctgggtttttgttttgttttgttttctttctaatcgaggtgtgaaaaagttctaggttcagttgaagttctgatgaagaaacacaattgagattttttcagtgataaaatctgcatatttgtatttcaacaatgtagctaaaacttgatgtaaattcctcctttttttccttttttggcttaatgaatatcatttattcagtatgaaatctttatactatatgttccacgtgttaagaataaatgtacattaaatcttggtaagacttt

SEQ ID NO: 36 - DNA, 8585 bp, Homo sapiens
cagaaagcggagagtcacagcggggccaggccctggggagcggagcctccaccgcccccctcattcccaggcaagggcttggggggaatgagccgggagagccgggtcccgagcctacagagccgggagcagctgagccgccggcgcctcggccgccgccgccgcctcctcctcctccgccgccgccagcccggagcctgagccggcggggcgggggggagaggagcgagcgcagcgcagcagcggagccccgcgaggcccgcccgggcgggtggggagggcagcccgggggactgggccccggggcggggtgggagggggggagaagacgaagacagggccgggtctctccgcggacgagacagcggggatcatggccgcgcaggtcgcccccgccgccgccagcagcctgggcaacccgccgccgccgccgccctcggagctgaagaaagccgagcagcagcagcgggaggaggcggggggcgaggcggcggcggcggcagcggccgagcgcggggaaatgaaggcagccgccgggcaggaaagcgagggccccgccgtggggccgccgcagccgctgggaaaggagctgcaggacggggccgagagcaatgggggtggcggcggcggcggagccggcagcggcggcgggcccggcgcggagccggacctgaagaactcgaacgggaacgcgggccctaggcccgccctgaacaataacctcacggagccgcccggcggcggcggtggcggcagcagcgatggggtgggggcgcctcctcactcagccgcggccgccttgccgcccccagcctacggcttcgggcaaccctacggccggagcccgtctgccgtcgccgccgccgcggccgccgtcttccaccaacaacatggcggacaacaaagccctggcctggcagcgctgcagagcggcggcggcgggggcctggagccctacgcggggccccagcagaactctcacgaccacggcttccccaaccaccagtacaactcctactaccccaaccgcagcgcctaccccccgcccgccccggcctacgcgctgagctccccgagaggtggcactccgggctccggcgcggcggcggctgccggctccaagccgcctccctcctccagcgcctccgcctcctcgtcgtcttcgtccttcgctcagcagcgcttcggggccatggggggaggcggcccctccgcggccggcgggggaactccccagcccaccgccacccccaccctcaaccaactgctcacgtcgcccagctcggcccggggctaccagggctaccccgggggcgactacagtggcgggccccaggacgggggcgccggcaagggcccggcggacatggcctcgcagtgttggggggctgcggcggcggcagctgcggcggcggccgcctcgggaggggcccaacaaaggagccaccacgcgcccatgagccccgggagcagcggcggcggggggcagccgctcgcccggacccctcagccatccagtccaatggatcagatgggcaagatgagacctcagccatatggcgggactaacccatactcgcagcaacagggacctccgtcaggaccgcagcaaggacatgggtacccagggcagccatacgggtcccagaccccgcagcggtacccgatgaccatgcagggccgggcgcagagtgccatgggcggcctctcttatacacagcagattcctccttatggacaacaaggccccagcgggtatggtcaacagggccagactccatattacaaccagcaaagtcctcaccctcagcagcagcagccaccctactcccagcaaccaccgtcccagacccctcatgcccaaccttcgtatcagcagcagccacagtctcaaccaccacagctccagtcctctcagcctccatactcccagcagccatcccagcctccacatcagcagtccccggctccatacccctcccagcagtcgacgacacagcagcacccccagagccagcccccctactcacagccacaggctcagtctccttaccagcagcagcaacctcagcagccagcaccctcgacgctctcccagcaggctgcgtatcctcagccccagtctcagcagtcccagcaaactgcctattcccagcagcgcttccctccaccgcaggagctatctcaagattcatttgggtctcaggcatcctcagccccctcaatgacctccagtaagggagggcaagaagatatgaacctgagccttcagtcaagaccctccagcttgcctgatctatctggttcaatagatgacctccccatggggacagaaggagctctgagtcctggagtgagcacatcagggatttccagcagccaaggagagcagagtaatccagctcagtctcctttctctcctcatacctcccctcacctgcctggcatccgaggcccttccccgtcccctgttggctctcccgccagtgttgctcagtctcgctcaggaccactctcgcctgctgcagtgccaggcaaccagatgccacctcggccacccagtggccagtcggacagcatcatgcatccttccatgaaccaatcaagcattgcccaagatcgaggttatatgcagaggaacccccagatgccccagtacagttccccccagcccggctgagccttatctccgcgtcagccttccggaggacagatacacacaggcatgggctcctaccagcagaactccatggggagctatggtccccaggggggtcagtatggcccacaaggtggctaccccaggcagccaaactataatgccttgcccaatgccaactaccccagtgcaggcatggctggaggcataaaccccatgggtgccggaggtcaaatgcatggacagcctggcatcccaccttatggcacactccctccagggaggatgagtcacgcctccatgggcaaccggccttatggccctaacatggccaatatgccacctcaggttgggtcagggatgtgtcccccaccagggggcatgaaccggaaaacccaagaaactgctgtcgccatgcatgttgctgccaactctatccaaaacaggccgccaggctaccccaatatgaatcaagggggcatgatgggaactggacctccttatggacaagggattaatagtatggctggcatgatcaaccctcagggacccccatattccatgggtggaaccatggccaacaattctgcagggatggcagccagcccagagatgatgggccttggggatgtaaagttaactccagccaccaaaatgaacaacaaggcagatgggacacccaagacagaatccaaatccaagaaatccagttcttctactacaaccaatgagaagatcaccaagttgtatgagctgggtggtgagcctgagaggaagatgtgggtggaccgttatctggccttcactgaggagaaggccatgggcatgacaaatctgcctgctgtgggtaggaaacctctggacctctatcgcctctatgtgtctgtgaaggagattggtggattgactcaggtcaacaagaacaaaaaatggcgggaacttgcaaccaacctcaatgtgggcacatcaagcagtgctgccagctccttgaaaaagcagtatatccagtgtctctatgcctttgaatgcaagattgaacggggagaagaccctcccccagacatctttgcagctgctgattccaagaagtcccagcccaagatccagcctccctctcctgcgggatcaggatctatgcaggggccccagactccccagtcaaccagcagttccatggcagaaggaggagacttaaagccaccaactccagcatccacaccacacagtcagatccccccattgccaggcatgagcaggagcaattcagttgggatccaggatgcctttaatgatggaagtgactccacattccagaagcggaattccatgactccaaaccctgggtatcagcccagtatgaatacctctgacatgatggggcgcatgtcctatgagccaaataaggatccttatggcagcatgaggaaagctccagggagtgatcccttcatgtcctcagggcagggccccaacggcgggatgggtgacccctacagtcgtgctgccggccctgggctaggaaatgtggcgatgggaccacgacagcactatccctatggaggtccttatgacagagtgaggacggagcctggaatagggcctgagggaaacatgagcactggggccccacagccgaatctcatgccttccaacccagactcggggatgtattctcctagccgctaccccccgcagcagcagcagcagcagcagcaacgacatgattcctatggcaatcagttctccacccaaggcaccccttctggcagccccttccccagccagcagactacaatgtatcaacagcaacagcagaattacaagcggccaatggatggcacatatggccctcctgccaagcggcacgaaggggagatgtacagcgtgccatacagcactgggcaggggcagcctcagcagcagcagttgcccccagcccagccccagcctgccagccagcaacaagctgcccagccttcccctcagcaagatgtatacaaccagtatggcaatgcctatcctgccactgccacagctgctactgagcgccgaccagcaggcggcccccagaaccaatttccattccagtttggccgagaccgtgtctctgcaccccctggcaccaatgcccagcaaaacatgccaccacaaatgatgggcggccccatacaggcatcagctgaggttgctcagcaaggcaccatgtggcaggggcgtaatgacatgacctataattatgccaacaggcagagcacgggctctgccccccagggccccgcctatcatggcgtgaaccgaacagatgaaatgctgcacacagatcagagggccaaccacgaaggctcgtggccttcccatggcacacgccagcccccatatggtccctctgcccctgtgccccccatgacaaggccccctccatctaactaccagcccccaccaagcatgcagaatcacattcctcaggtatccagccctgctcccctgccccggccaatggagaaccgcacctctcctagcaagtctccattcctgcactctgggatgaaaatgcagaaggcaggtcccccagtacctgcctcgcacatagcacctgcccctgtgcagccccccatgattcggcgggatatcaccttcccacctggctctgttgaagccacacagcctgtgttgaagcagaggaggcggctcacaatgaaagacattggaaccccggaggcatggcgggtaatgatgtccctcaagtctggtctcctggcagagagcacatgggcattagataccatcaacatcctgctgtatgatgacaacagcatcatgaccttcaacctcagtcagctcccagggttgctagagctccttgtagaatatttccgacgatgcctgattgagatctttggcattttaaaggagtatgaggtgggtgacccaggacagagaacgctactggatcctgggaggttcagcaaggtgtctagtccagctcccatggagggtggggaagaagaagaagaacttctaggtcctaaactagaagaggaagaagaagaggaagtagttgaaaatgatgaggagatagccttttcaggcaaggacaagccagcttcagagaatagtgaggagaagctgatcagtaagtttgacaagcttccagtaaagatcgtacagaagaatgatccatttgtggtggactgctcagataagcttgggcgtgtgcaggagtttgacagtggcctgctgcactggcggattggtgggggggacaccactgagcatatccagacccacttcgagagcaagacagagctgctgccttcccggcctcacgcaccctgcccaccagcccctcggaagcatgtgacaacagcagagggtacaccagggacaacagaccaggaggggcccccacctgatggacctccagaaaaacggatcacagccactatggatgacatgttgtctactcggtctagcaccttgaccgaggatggagctaagagttcagaggccatcaaggagagcagcaagtttccatttggcattagcccagcacagagccaccggaacatcaagatcctagaggacgaaccccacagtaaggatgagaccccactgtgtacccttctggactggcaggattctcttgccaagcgctgcgtctgtgtgtccaataccattcgaagcctgtcatttgtgccaggcaatgactttgagatgtccaaacacccagggctgctgctcatcctgggcaagctgatcctgctgcaccacaagcacccagaacggaagcaggcaccactaacttatgaaaaggaggaggaacaggaccaaggggtgagctgcaacaaagtggagtggtggtgggactgcttggagatgctccgggaaaacaccttggttacactcgccaacatctcggggcagttggacctatctccataccccgagagcatttgcctgcctgtcctggacggactcctacactgggcagtttgcccttcagctgaagcccaggaccccttttccaccctgggccccaatgccgtcctttccccgcagagactggtcttggaaaccctcagcaaactcagcatccaggacaacaatgtggacctgattctggccacaccccccttcagccgcctggagaagttgtatagcactatggtgcgcttcctcagtgaccgaaagaacccggtgtgccgggagatggctgtggtactgctggccaacctggctcagggggacagcctggcagctcgtgccattgcagtgcagaagggcagtatcggcaacctcctgggcttcctagaggacagccttgccgccacacagttccagcagagccaggccagcctcctccacatgcagaacccaccctttgagccaactagtgtggacatgatgcggcgggctgcccgcgcgctgcttgccttggccaaggtggacgagaaccactcagagtttactctgtacgaatcacggctgttggacatctcggtatcaccgttgatgaactcattggtttcacaagtcatttgtgatgtactgtttttgattggccagtcatgacagccgtgggacacctcccccccccgtgtgtgtgtgcgtgtgtggagaacttagaaactgactgttgccctttatttatgcaaaaccacctcagaatccagtttaccctgtgctgtccagcttctcccttgggaaaaagtctctcctgtttctctctcctccttccacctcccctccctccatcacctcacgcctttctgttccttgtcctcaccttactcccctcaggaccctaccccaccctctttgaaaagacaaagctctgcctacatagaagactttttttattttaaccaaagttactgttgtttacagtgagtttggggaaaaaaaataaaataaaaatggctttcccagtccttgcatcaacgggatgccacatttcataactgtttttaatggtaaaaaaaaaaaaaaaaaatacaaaaaaaaattctgaaggacaaaaaaggtgactgctgaactgtgtgtggtttattgttgtacattcacaatcttgcaggagccaagaagttcgcagttgtgaacagaccctgttcactggagaggcctgtgcagtagagtgtagaccctttcatgtactgtactgtacacctgatactgtaaacatactgtaataataatgtctcacatggaaacagaaaacgctgggtcagcagcaagctgtagtttttaaaaatgtttttagttaaacgttgaggagaaaaaaaaaaaaggcttttcccccaaagtatcatgtgtgaacctacaacaccctgacctctttctctcctccttgattgtatgaataaccctgagatcacctcttagaactggttttaacctttagctgcagcggctacgctgccacgtgtgtatatatatgacgttgtacattgcacatacccttggatccccacagtttggtcctcctcccagctacccctttatagtatgacgagttaacaagttggtgacctgcacaaagcgagacacagctatttaatctcttgccagatatcgcccctcttggtgcgatgctgtacaggtctctgtaaaaagtccttgctgtctcagcagccaatcaacttatagtttatttttttctgggtttttgttttgttttgttttctttctaatcgaggtgtgaaaaagttctaggttcagttgaagttctgatgaagaaacacaattgagattttttcagtgataaaatctgcatatttgtatttcaacaatgtagctaaaacttgatgtaaattcctcctttttttccttttttggcttaatgaatatcatttattcagtatgaaatctttatactatatgttccacgtgttaagaataaatgtacattaaatcttggtaagacttt

SEQ ID NO: 37 - DNA, 8585 bp, Homo sapiens
cagaaagcggagagtcacagcggggccaggccctggggagcggagcctccaccgcccccctcattcccaggcaagggcttggggggaatgagccgggagagccgggtcccgagcctacagagccgggagcagctgagccgccggcgcctcggccgccgccgccgcctcctcctcctccgccgccgccagcccggagcctgagccggcggggcgggggggagaggagcgagcgcagcgcagcagcggagccccgcgaggcccgcccgggcgggtggggagggcagcccgggggactgggccccggggcggggtgggagggggggagaagacgaagacagggccgggtctctccgcggacgagacagcggggatcatggccgcgcaggtcgcccccgccgccgccagcagcctgggcaacccgccgccgccgccgccctcggagctgaagaaagccgagcagcagcagcgggaggaggcggggggcgaggcggcggcggcggcagcggccgagcgcggggaaatgaaggcagccgccgggcaggaaagcgagggccccgccgtggggccgccgcagccgctgggaaaggagctgcaggacggggccgagagcaatgggggtggcggcggcggcggagccggcagcggcggcgggcccggcgcggagccggacctgaagaactcgaacgggaacgcgggccctaggcccgccctgaacaataacctcacggagccgcccggcggcggcggtggcggcagcagcgatggggtgggggcgcctcctcactcagccgcggccgccttgccgcccccagcctacggcttcgggcaaccctacggccggagcccgtctgccgtcgccgccgccgcggccgccgtcttccaccaacaacatggcggacaacaaagccctggcctggcagcgctgcagagcggcggcggcgggggcctggagccctacgcggggccccagcagaactctcacgaccacggcttccccaaccaccagtacaactcctactaccccaaccgcagcgcctaccccccgcccgccccggcctacgcgctgagctccccgagaggtggcactccgggctccggcgcggcggcggctgccggctccaagccgcctccctcctccagcgcctccgcctcctcgtcgtcttcgtccttcgctcagcagcgcttcggggccatggggggaggcggcccctccgcggccggcgggggaactccccagcccaccgccacccccaccctcaaccaactgctcacgtcgcccagctcggcccggggctaccagggctaccccgggggcgactacagtggcgggccccaggacgggggcgccggcaagggcccggcggacatggcctcgcagtgttggggggctgcggcggcggcagctgcggcggcggccgcctcgggaggggcccaacaaaggagccaccacgcgcccatgagccccgggagcagcggcggcggggggcagccgctcgcccggacccctcagccatccagtccaatggatcagatgggcaagatgagacctcagccatatggcgggactaacccatactcgcagcaacagggacctccgtcaggaccgcagcaaggacatgggtacccagggcagccatacgggtcccagaccccgcagcggtacccgatgaccatgcagggccgggcgcagagtgccatgggcggcctctcttatacacagcagattcctccttatggacaacaaggccccagcgggtatggtcaacagggccagactccatattacaaccagcaaagtcctcaccctcagcagcagcagccaccctactcccagcaaccaccgtcccagacccctcatgcccaaccttcgtatcagcagcagccacagtctcaaccaccacagctccagtcctctcagcctccatactcccagcagccatcccagcctccacatcagcagtccccggctccatacccctcccagcagtcgacgacacagcagcacccccagagccagcccccctactcacagccacaggctcagtctccttaccagcagcagcaacctcagcagccagcaccctcgacgctctcccagcaggctgcgtatcctcagccccagtctcagcagtcccagcaaactgcctattcccagcagcgcttccctccaccgcaggagctatctcaagattcatttgggtctcaggcatcctcagccccctcaatgacctccagtaagggagggcaagaagatatgaacctgagccttcagtcaagaccctccagcttgcctgatctatctggttcaatagatgacctccccatggggacagaaggagctctgagtcctggagtgagcacatcagggatttccagcagccaaggagagcagagtaatccagctcagtctcctttctctcctcatacctcccctcacctgcctggcatccgaggcccttccccgtcccctgttggctctcccgccagtgttgctcagtctcgctcaggaccactctcgcctgctgcagtgccaggcaaccagatgccacctcggccacccagtggccagtcggacagcatcatgcatccttccatgaaccaatcaagcattgcccaagatcgaggttatatgcagaggaacccccagatgccccagtacagttccccccagcccggctcagccttatctccgcgtcagccttccggaggacagatacacacaggcatgggctcctaccagcagaactccatggggagctatggtccccaggggggtcagtatggcccacaaggtggctaccccaggcagccaaactataatgccttgcccaatgccaactaccccagtgcaggcatggctggaggcataaaccccatgggtgccggaggtcaaatgcatggacagcctggcatcccaccttatggcacactccctccagggaggatgagtcacgcctccatgggcaaccggccttatggccctaacatggccaatatgccacctcaggttgggtcagggatgtgtcccccaccagggggcatgaaccggaaaacccaagaaactgctgtcgccatgcatgttgctgccaactctatccaaaacaggccgccaggctaccccaatatgaatcaagggggcatgatgggaactggacctccttatggacaagggattaatagtatggctggcatgatcaaccctcagggacccccatattccatgggtggaaccatggccaacaattctgcagggatggcagccagcccagagatgatgggccttggggatgtaaagttaactccagccaccaaaatgaacaacaaggcagatgggacacccaagacagaatccaaatccaagaaatccagttcttctactacaaccaatgagaagatcaccaagttgtatgagctgggtggtgagcctgagaggaagatgtgggtggaccgttatctggccttcactgaggagaaggccatgggcatgacaaatctgcctgctgtgggtaggaaacctctggacctctatcgcctctatgtgtctgtgaaggagattggtggattgactcaggtcaacaagaacaaaaaatggcgggaacttgcaaccaacctcaatgtgggcacatcaagcagtgctgccagctccttgaaaaagcagtatatccagtgtctctatgcctttgaatgcaagattgaacggggagaagaccctcccccagacatctttgcagctgctgattccaagaagtcccagcccaagatccagcctccctctcctgcgggatcaggatctatgcaggggccccagactccccagtcaaccagcagttccatggcagaaggaggagacttaaagccaccaactccagcatccacaccacacagtcagatccccccattgccaggcatgagcaggagcaattcagttgggatccaggatgcctttaatgatggaagtgactccacattccagaagcggaattccatgactccaaaccctgggtatcagcccagtatgaatacctctgacatgatggggcgcatgtcctatgagccaaataaggatccttatggcagcatgaggaaagctccagggagtgatcccttcatgtcctcagggcagggccccaacggcgggatgggtgacccctacagtcgtgctgccggccctgggctaggaaatgtggcgatgggaccacgacagcactatccctatggaggtccttatgacagagtgaggacggagcctggaatagggcctgagggaaacatgagcactggggccccacagccgaatctcatgccttccaacccagactcggggatgtattctcctagccgctaccccccgtagcagcagcagcagcagcagcaacgacatgattcctatggcaatcagttctccacccaaggcaccccttctggcagccccttccccagccagcagactacaatgtatcaacagcaacagcagaattacaagcggccaatggatggcacatatggccctcctgccaagcggcacgaaggggagatgtacagcgtgccatacagcactgggcaggggcagcctcagcagcagcagttgcccccagcccagccccagcctgccagccagcaacaagctgcccagccttcccctcagcaagatgtatacaaccagtatggcaatgcctatcctgccactgccacagctgctactgagcgccgaccagcaggcggcccccagaaccaatttccattccagtttggccgagaccgtgtctctgcaccccctggcaccaatgcccagcaaaacatgccaccacaaatgatgggcggccccatacaggcatcagctgaggttgctcagcaaggcaccatgtggcaggggcgtaatgacatgacctataattatgccaacaggcagagcacgggctctgccccccagggccccgcctatcatggcgtgaaccgaacagatgaaatgctgcacacagatcagagggccaaccacgaaggctcgtggccttcccatggcacacgccagcccccatatggtccctctgcccctgtgccccccatgacaaggccccctccatctaactaccagcccccaccaagcatgcagaatcacattcctcaggtatccagccctgctcccctgccccggccaatggagaaccgcacctctcctagcaagtctccattcctgcactctgggatgaaaatgcagaaggcaggtcccccagtacctgcctcgcacatagcacctgcccctgtgcagccccccatgattcggcgggatatcaccttcccacctggctctgttgaagccacacagcctgtgttgaagcagaggaggcggctcacaatgaaagacattggaaccccggaggcatggcgggtaatgatgtccctcaagtctggtctcctggcagagagcacatgggcattagataccatcaacatcctgctgtatgatgacaacagcatcatgaccttcaacctcagtcagctcccagggttgctagagctccttgtagaatatttccgacgatgcctgattgagatctttggcattttaaaggagtatgaggtgggtgacccaggacagagaacgctactggatcctgggaggttcagcaaggtgtctagtccagctcccatggagggtggggaagaagaagaagaacttctaggtcctaaactagaagaggaagaagaagaggaagtagttgaaaatgatgaggagatagccttttcaggcaaggacaagccagcttcagagaatagtgaggagaagctgatcagtaagtttgacaagcttccagtaaagatcgtacagaagaatgatccatttgtggtggactgctcagataagcttgggcgtgtgcaggagtttgacagtggcctgctgcactggcggattggtgggggggacaccactgagcatatccagacccacttcgagagcaagacagagctgctgccttcccggcctcacgcaccctgcccaccagcccctcggaagcatgtgacaacagcagagggtacaccagggacaacagaccaggaggggcccccacctgatggacctccagaaaaacggatcacagccactatggatgacatgttgtctactcggtctagcaccttgaccgaggatggagctaagagttcagaggccatcaaggagagcagcaagtttccatttggcattagcccagcacagagccaccggaacatcaagatcctagaggacgaaccccacagtaaggatgagaccccactgtgtacccttctggactggcaggattctcttgccaagcgctgcgtctgtgtgtccaataccattcgaagcctgtcatttgtgccaggcaatgactttgagatgtccaaacacccagggctgctgctcatcctgggcaagctgatcctgctgcaccacaagcacccagaacggaagcaggcaccactaacttatgaaaaggaggaggaacaggaccaaggggtgagctgcaacaaagtggagtggtggtgggactgcttggagatgctccgggaaaacaccttggttacactcgccaacatctcggggcagttggacctatctccataccccgagagcatttgcctgcctgtcctggacggactcctacactgggcagtttgcccttcagctgaagcccaggaccccttttccaccctgggccccaatgccgtcctttccccgcagagactggtcttggaaaccctcagcaaactcagcatccaggacaacaatgtggacctgattctggccacaccccccttcagccgcctggagaagttgtatagcactatggtgcgcttcctcagtgaccgaaagaacccggtgtgccgggagatggctgtggtactgctggccaacctggctcagggggacagcctggcagctcgtgccattgcagtgcagaagggcagtatcggcaacctcctgggcttcctagaggacagccttgccgccacacagttccagcagagccaggccagcctcctccacatgcagaacccaccctttgagccaactagtgtggacatgatgcggcgggctgcccgcgcgctgcttgccttggccaaggtggacgagaaccactcagagtttactctgtacgaatcacggctgttggacatctcggtatcaccgttgatgaactcattggtttcacaagtcatttgtgatgtactgtttttgattggccagtcatgacagccgtgggacacctcccccccccgtgtgtgtgtgcgtgtgtggagaacttagaaactgactgttgccctttatttatgcaaaaccacctcagaatccagtttaccctgtgctgtccagcttctcccttgggaaaaagtctctcctgtttctctctcctccttccacctcccctccctccatcacctcacgcctttctgttccttgtcctcaccttactcccctcaggaccctaccccaccctctttgaaaagacaaagctctgcctacatagaagactttttttattttaaccaaagttactgttgtttacagtgagtttggggaaaaaaaataaaataaaaatggctttcccagtccttgcatcaacgggatgccacatttcataactgtttttaatggtaaaaaaaaaaaaaaaaaatacaaaaaaaaattctgaaggacaaaaaaggtgactgctgaactgtgtgtggtttattgttgtacattcacaatcttgcaggagccaagaagttcgcagttgtgaacagaccctgttcactggagaggcctgtgcagtagagtgtagaccctttcatgtactgtactgtacacctgatactgtaaacatactgtaataataatgtctcacatggaaacagaaaacgctgggtcagcagcaagctgtagtttttaaaaatgtttttagttaaacgttgaggagaaaaaaaaaaaaggcttttcccccaaagtatcatgtgtgaacctacaacaccctgacctctttctctcctccttgattgtatgaataaccctgagatcacctcttagaactggttttaacctttagctgcagcggctacgctgccacgtgtgtatatatatgacgttgtacattgcacatacccttggatccccacagtttggtcctcctcccagctacccctttatagtatgacgagttaacaagttggtgacctgcacaaagcgagacacagctatttaatctcttgccagatatcgcccctcttggtgcgatgctgtacaggtctctgtaaaaagtccttgctgtctcagcagccaatcaacttatagtttatttttttctgggtttttgttttgttttgttttctttctaatcgaggtgtgaaaaagttctaggttcagttgaagttctgatgaagaaacacaattgagattttttcagtgataaaatctgcatatttgtatttcaacaatgtagctaaaacttgatgtaaattcctcctttttttccttttttggcttaatgaatatcatttattcagtatgaaatctttatactatatgttccacgtgttaagaataaatgtacattaaatcttggtaagacttt

SEQ ID NO: 38 - DNA, 8585 bp, Homo sapiens
cagaaagcggagagtcacagcggggccaggccctggggagcggagcctccaccgcccccctcattcccaggcaagggcttggggggaatgagccgggagagccgggtcccgagcctacagagccgggagcagctgagccgccggcgcctcggccgccgccgccgcctcctcctcctccgccgccgccagcccggagcctgagccggcggggcgggggggagaggagcgagcgcagcgcagcagcggagccccgcgaggcccgcccgggcgggtggggagggcagcccgggggactgggccccggggcggggtgggagggggggagaagacgaagacagggccgggtctctccgcggacgagacagcggggatcatggccgcgcaggtcgcccccgccgccgccagcagcctgggcaacccgccgccgccgccgccctcggagctgaagaaagccgagcagcagcagcgggaggaggcggggggcgaggcggcggcggcggcagcggccgagcgcggggaaatgaaggcagccgccgggcaggaaagcgagggccccgccgtggggccgccgcagccgctgggaaaggagctgcaggacggggccgagagcaatgggggtggcggcggcggcggagccggcagcggcggcgggcccggcgcggagccggacctgaagaactcgaacgggaacgcgggccctaggcccgccctgaacaataacctcacggagccgcccggcggcggcggtggcggcagcagcgatggggtgggggcgcctcctcactcagccgcggccgccttgccgcccccagcctacggcttcgggcaaccctacggccggagcccgtctgccgtcgccgccgccgcggccgccgtcttccaccaacaacatggcggacaacaaagccctggcctggcagcgctgcagagcggcggcggcgggggcctggagccctacgcggggccccagcagaactctcacgaccacggcttccccaaccaccagtacaactcctactaccccaaccgcagcgcctaccccccgcccgccccggcctacgcgctgagctccccgagaggtggcactccgggctccggcgcggcggcggctgccggctccaagccgcctccctcctccagcgcctccgcctcctcgtcgtcttcgtccttcgctcagcagcgcttcggggccatggggggaggcggcccctccgcggccggcgggggaactccccagcccaccgccacccccaccctcaaccaactgctcacgtcgcccagctcggcccggggctaccagggctaccccgggggcgactacagtggcgggccccaggacgggggcgccggcaagggcccggcggacatggcctcgcagtgttggggggctgcggcggcggcagctgcggcggcggccgcctcgggaggggcccaacaaaggagccaccacgcgcccatgagccccgggagcagcggcggcggggggcagccgctcgcccggacccctcagccatccagtccaatggatcagatgggcaagatgagacctcagccatatggcgggactaacccatactcgcagcaacagggacctccgtcaggaccgcagcaaggacatgggtacccagggcagccatacgggtcccagaccccgcagcggtacccgatgaccatgcagggccgggcgcagagtgccatgggcggcctctcttatacacagcagattcctccttatggacaacaaggccccagcgggtatggtcaacagggccagactccatattacaaccagcaaagtcctcaccctcagcagcagcagccaccctactcccagcaaccaccgtcccagacccctcatgcccaaccttcgtatcagcagcagccacagtctcaaccaccacagctccagtcctctcagcctccatactcccagcagccatcccagcctccacatcagcagtccccggctccatacccctcccagcagtcgacgacacagcagcacccccagagccagcccccctactcacagccacaggctcagtctccttaccagcagcagcaacctcagcagccagcaccctcgacgctctcccagcaggctgcgtatcctcagccccagtctcagcagtcccagcaaactgcctattcccagcagcgcttccctccaccgcaggagctatctcaagattcatttgggtctcaggcatcctcagccccctcaatgacctccagtaagggagggcaagaagatatgaacctgagccttcagtcaagaccctccagcttgcctgatctatctggttcaatagatgacctccccatggggacagaaggagctctgagtcctggagtgagcacatcagggatttccagcagccaaggagagcagagtaatccagctcagtctcctttctctcctcatacctcccctcacctgcctggcatccgaggcccttccccgtcccctgttggctctcccgccagtgttgctcagtctcgctcaggaccactctcgcctgctgcagtgccaggcaaccagatgccacctcggccacccagtggccagtcggacagcatcatgcatccttccatgaaccaatcaagcattgcccaagatcgaggttatatgcagaggaacccccagatgccccagtacagttccccccagcccggctcagccttatctccgcgtcagccttccggaggacagatacacacaggcatgggctcctaccagcagaactccatggggagctatggtccccaggggggtcagtatggcccacaaggtggctaccccaggcagccaaactataatgccttgcccaatgccaactaccccagtgcaggcatggctggaggcataaaccccatgggtgccggaggtcaaatgcatggacagcctggcatcccaccttatggcacactccctccagggaggatgagtcacgcctccatgggcaaccggccttatggccctaacatggccaatatgccacctcaggttgggtcagggatgtgtcccccaccagggggcatgaaccggaaaacccaagaaactgctgtcgccatgcatgttgctgccaactctatccaaaacaggccgccaggctaccccaatatgaatcaagggggcatgatgggaactggacctccttatggacaagggattaatagtatggctggcatgatcaaccctcagggacccccatattccatgggtggaaccatggccaacaattctgcagggatggcagccagcccagagatgatgggccttggggatgtaaagttaactccagccaccaaaatgaacaacaaggcagatgggacacccaagacagaatccaaatccaagaaatccagttcttctactacaaccaatgagaagatcaccaagttgtatgagctgggtggtgagcctgagaggaagatgtgggtggaccgttatctggccttcactgaggagaaggccatgggcatgacaaatctgcctgctgtgggtaggaaacctctggacctctatcgcctctatgtgtctgtgaaggagattggtggattgactcaggtcaacaagaacaaaaaatggcgggaacttgcaaccaacctcaatgtgggcacatcaagcagtgctgccagctccttgaaaaagcagtatatccagtgtctctatgcctttgaatgcaagattgaacggggagaagaccctcccccagacatctttgcagctgctgattccaagaagtcccagcccaagatccagcctccctctcctgcgggatcaggatctatgcaggggccccagactccccagtcaaccagcagttccatggcagaaggaggagacttaaagccaccaactccagcatccacaccacacagtcagatccccccattgccaggcatgagcaggagcaattcagttgggatccaggatgcctttaatgatggaagtgactccacattccagaagcggaattccatgactccaaaccctgggtatcagcccagtatgaatacctctgacatgatggggcgcatgtcctatgagccaaataaggatccttatggcagcatgaggaaagctccagggagtgatcccttcatgtcctcagggcagggccccaacggcgggatgggtgacccctacagtcgtgctgccggccctgggctaggaaatgtggcgatgggaccacgacagcactatccctatggaggtccttatgacagagtgaggacggagcctggaatagggcctgagggaaacatgagcactggggccccacagccgaatctcatgccttccaacccagactcggggatgtattctcctagccgctaccccccgcagcagcagcagcagcagcagcaacgacatgattcctatggcaatcagttctccacccaaggcaccccttctggcagccccttccccagccagcagactacaatgtatcaacagcaacagcagaattacaagcggccaatggatggcacatatggccctcctgccaagcggcacgaaggggagatgtacagcgtgccatacagcactgggcaggggcagcctcagcagcagcagttgcccccagcccagccccagcctgccagccagcaacaagctgcccagccttcccctcagcaagatgtatacaaccagtatggcaatgcctatcctgccactgccacagctgctactgagcgccgaccagcaggcggcccccagaaccaatttccattccagtttggccgagaccgtgtctctgcaccccctggcaccaatgcccagcaaaacatgccaccacaaatgatgggcggccccatacaggcatcagctgaggttgctcagcaaggcaccatgtggcaggggcgtaatgacatgacctataattatgccaacaggcagagcacgggctctgccccccagggccccgcctatcatggcgtgaaccgaacagatgaaatgctgcacacagatcagagggccaaccacgaaggctcgtggccttcccatggcacacgccagcccccatatggtccctctgcccctgtgccccccatgacaaggccccctccatctaactaccagcccccaccaagcatgcagaatcacattcctcaggtatccagccctgctcccctgccccggccaatggagaaccgcacctctcctagcaagtctccattcctgcactctgggatgaaaatgcagaaggcaggtcccccagtacctgcctcgcacatagcacctgcccctgtgcagccccccatgattcggcgggatatcaccttcccacctggctctgttgaagccacacagcctgtgttgaagcagaggaggcggctcacaatgaaagacattggaaccccggaggcatggcgggtaatgatgtccctcaagtctggtctcctggcagagagcacatgggcattagataccatcaacatcctgctgtatgatgacaacagcatcatgaccttcaacctcagtcagctcccagggttgctagagctccttgtagaatatttccgacgatgcctgattgagatctttggcattttaaaggagtatgaggtgggtgacccaggacagagaacgctactggatcctgggaggttcagcaaggtgtctagtccagctcccatggagggtggggaagaagaagaagaacttctaggtcctaaactagaagaggaagaagaagaggaagtagttgaaaatgatgaggagatagccttttcaggcaaggacaagccagcttcagagaatagtgaggagaagctgatcagtaagtttgacaagcttccagtaaagatcgtacagaagaatgatccatttgtggtggactgctcagataagcttgggcgtgtgcaggagtttgacagtggcctgctgcactggcggattggtggggggggcaccactgagcatatccagacccacttcgagagcaagacagagctgctgccttcccggcctcacgcaccctgcccaccagcccctcggaagcatgtgacaacagcagagggtacaccagggacaacagaccaggaggggcccccacctgatggacctccagaaaaacggatcacagccactatggatgacatgttgtctactcggtctagcaccttgaccgaggatggagctaagagttcagaggccatcaaggagagcagcaagtttccatttggcattagcccagcacagagccaccggaacatcaagatcctagaggacgaaccccacagtaaggatgagaccccactgtgtacccttctggactggcaggattctcttgccaagcgctgcgtctgtgtgtccaataccattcgaagcctgtcatttgtgccaggcaatgactttgagatgtccaaacacccagggctgctgctcatcctgggcaagctgatcctgctgcaccacaagcacccagaacggaagcaggcaccactaacttatgaaaaggaggaggaacaggaccaaggggtgagctgcaacaaagtggagtggtggtgggactgcttggagatgctccgggaaaacaccttggttacactcgccaacatctcggggcagttggacctatctccataccccgagagcatttgcctgcctgtcctggacggactcctacactgggcagtttgcccttcagctgaagcccaggaccccttttccaccctgggccccaatgccgtcctttccccgcagagactggtcttggaaaccctcagcaaactcagcatccaggacaacaatgtggacctgattctggccacaccccccttcagccgcctggagaagttgtatagcactatggtgcgcttcctcagtgaccgaaagaacccggtgtgccgggagatggctgtggtactgctggccaacctggctcagggggacagcctggcagctcgtgccattgcagtgcagaagggcagtatcggcaacctcctgggcttcctagaggacagccttgccgccacacagttccagcagagccaggccagcctcctccacatgcagaacccaccctttgagccaactagtgtggacatgatgcggcgggctgcccgcgcgctgcttgccttggccaaggtggacgagaaccactcagagtttactctgtacgaatcacggctgttggacatctcggtatcaccgttgatgaactcattggtttcacaagtcatttgtgatgtactgtttttgattggccagtcatgacagccgtgggacacctcccccccccgtgtgtgtgtgcgtgtgtggagaacttagaaactgactgttgccctttatttatgcaaaaccacctcagaatccagtttaccctgtgctgtccagcttctcccttgggaaaaagtctctcctgtttctctctcctccttccacctcccctccctccatcacctcacgcctttctgttccttgtcctcaccttactcccctcaggaccctaccccaccctctttgaaaagacaaagctctgcctacatagaagactttttttattttaaccaaagttactgttgtttacagtgagtttggggaaaaaaaataaaataaaaatggctttcccagtccttgcatcaacgggatgccacatttcataactgtttttaatggtaaaaaaaaaaaaaaaaaatacaaaaaaaaattctgaaggacaaaaaaggtgactgctgaactgtgtgtggtttattgttgtacattcacaatcttgcaggagccaagaagttcgcagttgtgaacagaccctgttcactggagaggcctgtgcagtagagtgtagaccctttcatgtactgtactgtacacctgatactgtaaacatactgtaataataatgtctcacatggaaacagaaaacgctgggtcagcagcaagctgtagtttttaaaaatgtttttagttaaacgttgaggagaaaaaaaaaaaaggcttttcccccaaagtatcatgtgtgaacctacaacaccctgacctctttctctcctccttgattgtatgaataaccctgagatcacctcttagaactggttttaacctttagctgcagcggctacgctgccacgtgtgtatatatatgacgttgtacattgcacatacccttggatccccacagtttggtcctcctcccagctacccctttatagtatgacgagttaacaagttggtgacctgcacaaagcgagacacagctatttaatctcttgccagatatcgcccctcttggtgcgatgctgtacaggtctctgtaaaaagtccttgctgtctcagcagccaatcaacttatagtttatttttttctgggtttttgttttgttttgttttctttctaatcgaggtgtgaaaaagttctaggttcagttgaagttctgatgaagaaacacaattgagattttttcagtgataaaatctgcatatttgtatttcaacaatgtagctaaaacttgatgtaaattcctcctttttttccttttttggcttaatgaatatcatttattcagtatgaaatctttatactatatgttccacgtgttaagaataaatgtacattaaatcttggtaagacttt

SEQ ID NO: 39 - DNA, 8584 bp, Homo sapiens
cagaaagcggagagtcacagcggggccaggccctggggagcggagcctccaccgcccccctcattcccaggcaagggcttggggggaatgagccgggagagccgggtcccgagcctacagagccgggagcagctgagccgccggcgcctcggccgccgccgccgcctcctcctcctccgccgccgccagcccggagcctgagccggcggggcgggggggagaggagcgagcgcagcgcagcagcggagccccgcgaggcccgcccgggcgggtggggagggcagcccgggggactgggccccggggcggggtgggagggggggagaagacgaagacagggccgggtctctccgcggacgagacagcggggatcatggccgcgcaggtcgcccccgccgccgccagcagcctgggcaacccgccgccgccgccgccctcggagctgaagaaagccgagcagcagcagcgggaggaggcggggggcgaggcggcggcggcggcagcggccgagcgcggggaaatgaaggcagccgccgggcaggaaagcgagggccccgccgtggggccgccgcagccgctgggaaaggagctgcaggacggggccgagagcaatgggggtggcggcggcggcggagccggcagcggcggcgggcccggcgcggagccggacctgaagaactcgaacgggaacgcgggccctaggcccgccctgaacaataacctcacggagccgcccggcggcggcggtggcggcagcagcgatggggtgggggcgcctcctcactcagccgcggccgccttgccgcccccagcctacggcttcgggcaaccctacggccggagcccgtctgccgtcgccgccgccgcggccgccgtcttccaccaacaacatggcggacaacaaagccctggcctggcagcgctgcagagcggcggcggcgggggcctggagccctacgcggggccccagcagaactctcacgaccacggcttccccaaccaccagtacaactcctactaccccaaccgcagcgcctaccccccgcccgccccggcctacgcgctgagctccccgagaggtggcactccgggctccggcgcggcggcggctgccggctccaagccgcctccctcctccagcgcctccgcctcctcgtcgtcttcgtccttcgctcagcagcgcttcggggccatggggggaggcggcccctccgcggccggcgggggaactccccagcccaccgccacccccaccctcaaccaactgctcacgtcgcccagctcggcccggggctaccagggctaccccgggggcgactacagtggcgggccccaggacgggggcgccggcaagggcccggcggacatggcctcgcagtgttggggggctgcggcggcggcagctgcggcggcggccgcctcgggaggggcccaacaaaggagccaccacgcgcccatgagccccgggagcagcggcggcggggggcagccgctcgcccggacccctcagccatccagtccaatggatcagatgggcaagatgagacctcagccatatggcgggactaacccatactcgcagcaacagggacctccgtcaggaccgcagcaaggacatgggtacccagggcagccatacgggtcccagaccccgcagcggtacccgatgaccatgcagggccgggcgcagagtgccatgggcggcctctcttatacacagcagattcctccttatggacaacaaggccccagcgggtatggtcaacagggccagactccatattacaaccagcaaagtcctcaccctcagcagcagcagccaccctactcccagcaaccaccgtcccagacccctcatgcccaaccttcgtatcagcagcagccacagtctcaaccaccacagctccagtcctctcagcctccatactcccagcagccatcccagcctccacatcagcagtccccggctccatacccctcccagcagtcgacgacacagcagcacccccagagccagcccccctactcacagccacaggctcagtctccttaccagcagcagcaacctcagcagccagcaccctcgacgctctcccagcaggctgcgtatcctcagccccagtctcagcagtcccagcaaactgcctattcccagcagcgcttccctccaccgcaggagctatctcaagattcatttgggtctcaggcatcctcagccccctcaatgacctccagtaagggagggcaagaagatatgaacctgagccttcagtcaagaccctccagcttgcctgatctatctggttcaatagatgacctccccatggggacagaaggagctctgagtcctggagtgagcacatcagggatttccagcagccaaggagagcagagtaatccagctcagtctcctttctctcctcatacctcccctcacctgcctggcatccgaggcccttccccgtcccctgttggctctcccgccagtgttgctcagtctcgctcaggaccactctcgcctgctgcagtgccaggcaaccagatgccacctcggccacccagtggccagtcggacagcatcatgcatccttccatgaaccaatcaagcattgcccaagatcgaggttatatgcagaggaacccccagatgccccagtacagttccccccagcccggctcagccttatctccgcgtcagccttccggaggacagatacacacaggcatgggctcctaccagcagaactccatggggagctatggtccccaggggggtcagtatggcccacaaggtggctaccccaggcagccaaactataatgccttgcccaatgccaactaccccagtgcaggcatggctggaggcataaaccccatgggtgccggaggtcaaatgcatggacagcctggcatcccaccttatggcacactccctccagggaggatgagtcacgcctccatgggcaaccggccttatggccctaacatggccaatatgccacctcaggttgggtcagggatgtgtcccccaccagggggcatgaaccggaaaacccaagaaactgctgtcgccatgcatgttgctgccaactctatccaaaacaggccgccaggctaccccaatatgaatcaagggggcatgatgggaactggacctccttatggacaagggattaatagtatggctggcatgatcaaccctcagggacccccatattccatgggtggaaccatggccaacaattctgcagggatggcagccagcccagagatgatgggccttggggatgtaaagttaactccagccaccaaaatgaacaacaaggcagatgggacacccaagacagaatccaaatccaagaaatccagttcttctactacaaccaatgagaagatcaccaagttgtatgagctgggtggtgagcctgagaggaagatgtgggtggaccgttatctggccttcactgaggagaaggccatgggcatgacaaatctgcctgctgtgggtaggaaacctctggacctctatcgcctctatgtgtctgtgaaggagattggtggattgactcaggtcaacaagaacaaaaaatggcgggaacttgcaaccaacctcaatgtgggcacatcaagcagtgctgccagctccttgaaaaagcagtatatccagtgtctctatgcctttgaatgcaagattgaacggggagaagaccctcccccagacatctttgcagctgctgattccaagaagtcccagcccaagatccagcctccctctcctgcgggatcaggatctatgcaggggccccagactccccagtcaaccagcagttccatggcagaaggaggagacttaaagccaccaactccagcatccacaccacacagtcagatccccccattgccaggcatgagcaggagcaattcagttgggatccaggatgcctttaatgatggaagtgactccacattccagaagcggaattccatgactccaaaccctgggtatcagcccagtatgaatacctctgacatgatggggcgcatgtcctatgagccaaataaggatccttatggcagcatgaggaaagctccagggagtgatcccttcatgtcctcagggcagggccccaacggcgggatgggtgacccctacagtcgtgctgccggccctgggctaggaaatgtggcgatgggaccacgacagcactatccctatggaggtccttatgacagagtgaggacggagcctggaatagggcctgagggaaacatgagcactggggccccacagccgaatctcatgccttccaacccagactcggggatgtattctcctagccgctaccccccgcagcagcagcagcagcagcagcaacgacatgattcctatggcaatcagttctccacccaaggcaccccttctggcagccccttccccagccagcagactacaatgtatcaacagcaacagcagaattacaagcggccaatggatggcacatatggccctcctgccaagcggcacgaaggggagatgtacagcgtgccatacagcactgggcaggggcagcctcagcagcagcagttgcccccagcccagccccagcctgccagccagcaacaagctgcccagccttcccctcagcaagatgtatacaaccagtatggcaatgcctatcctgccactgccacagctgctactgagcgccgaccagcaggcggcccccagaaccaatttccattccagtttggccgagaccgtgtctctgcaccccctggcaccaatgcccagcaaaacatgccaccacaaatgatgggcggccccatacaggcatcagctgaggttgctcagcaaggcaccatgtggcaggggcgtaatgacatgacctataattatgccaacaggcagagcacgggctctgccccccagggccccgcctatcatggcgtgaaccgaacagatgaaatgctgcacacagatcagagggccaaccacgaaggctcgtggccttcccatggcacacgccagcccccatatggtccctctgcccctgtgccccccatgacaaggccccctccatctaactaccagcccccaccaagcatgcagaatcacattcctcaggtatccagccctgctcccctgccccggccaatggagaaccgcacctctcctagcaagtctccattcctgcactctgggatgaaaatgcagaaggcaggtcccccagtacctgcctcgcacatagcacctgcccctgtgcagccccccatgattcggcgggatatcaccttcccacctggctctgttgaagccacacagcctgtgttgaagcagaggaggcggctcacaatgaaagacattggaaccccggaggcatggcgggtaatgatgtccctcaagtctggtctcctggcagagagcacatgggcattagataccatcaacatcctgctgtatgatgacaacagcatcatgaccttcaacctcagtcagctcccagggttgctagagctccttgtagaatatttccgacgatgcctgattgagatctttggcattttaaaggagtatgaggtgggtgacccaggacagagaacgctactggatcctgggaggttcagcaaggtgtctagtccagctcccatggagggtggggaagaagagaagaacttctaggtcctaaactagaagaggaagaagaagaggaagtagttgaaaatgatgaggagatagccttttcaggcaaggacaagccagcttcagagaatagtgaggagaagctgatcagtaagtttgacaagcttccagtaaagatcgtacagaagaatgatccatttgtggtggactgctcagataagcttgggcgtgtgcaggagtttgacagtggcctgctgcactggcggattggtgggggggacaccactgagcatatccagacccacttcgagagcaagacagagctgctgccttcccggcctcacgcaccctgcccaccagcccctcggaagcatgtgacaacagcagagggtacaccagggacaacagaccaggaggggcccccacctgatggacctccagaaaaacggatcacagccactatggatgacatgttgtctactcggtctagcaccttgaccgaggatggagctaagagttcagaggccatcaaggagagcagcaagtttccatttggcattagcccagcacagagccaccggaacatcaagatcctagaggacgaaccccacagtaaggatgagaccccactgtgtacccttctggactggcaggattctcttgccaagcgctgcgtctgtgtgtccaataccattcgaagcctgtcatttgtgccaggcaatgactttgagatgtccaaacacccagggctgctgctcatcctgggcaagctgatcctgctgcaccacaagcacccagaacggaagcaggcaccactaacttatgaaaaggaggaggaacaggaccaaggggtgagctgcaacaaagtggagtggtggtgggactgcttggagatgctccgggaaaacaccttggttacactcgccaacatctcggggcagttggacctatctccataccccgagagcatttgcctgcctgtcctggacggactcctacactgggcagtttgcccttcagctgaagcccaggaccccttttccaccctgggccccaatgccgtcctttccccgcagagactggtcttggaaaccctcagcaaactcagcatccaggacaacaatgtggacctgattctggccacaccccccttcagccgcctggagaagttgtatagcactatggtgcgcttcctcagtgaccgaaagaacccggtgtgccgggagatggctgtggtactgctggccaacctggctcagggggacagcctggcagctcgtgccattgcagtgcagaagggcagtatcggcaacctcctgggcttcctagaggacagccttgccgccacacagttccagcagagccaggccagcctcctccacatgcagaacccaccctttgagccaactagtgtggacatgatgcggcgggctgcccgcgcgctgcttgccttggccaaggtggacgagaaccactcagagtttactctgtacgaatcacggctgttggacatctcggtatcaccgttgatgaactcattggtttcacaagtcatttgtgatgtactgtttttgattggccagtcatgacagccgtgggacacctcccccccccgtgtgtgtgtgcgtgtgtggagaacttagaaactgactgttgccctttatttatgcaaaaccacctcagaatccagtttaccctgtgctgtccagcttctcccttgggaaaaagtctctcctgtttctctctcctccttccacctcccctccctccatcacctcacgcctttctgttccttgtcctcaccttactcccctcaggaccctaccccaccctctttgaaaagacaaagctctgcctacatagaagactttttttattttaaccaaagttactgttgtttacagtgagtttggggaaaaaaaataaaataaaaatggctttcccagtccttgcatcaacgggatgccacatttcataactgtttttaatggtaaaaaaaaaaaaaaaaaatacaaaaaaaaattctgaaggacaaaaaaggtgactgctgaactgtgtgtggtttattgttgtacattcacaatcttgcaggagccaagaagttcgcagttgtgaacagaccctgttcactggagaggcctgtgcagtagagtgtagaccctttcatgtactgtactgtacacctgatactgtaaacatactgtaataataatgtctcacatggaaacagaaaacgctgggtcagcagcaagctgtagtttttaaaaatgtttttagttaaacgttgaggagaaaaaaaaaaaaggcttttcccccaaagtatcatgtgtgaacctacaacaccctgacctctttctctcctccttgattgtatgaataaccctgagatcacctcttagaactggttttaacctttagctgcagcggctacgctgccacgtgtgtatatatatgacgttgtacattgcacatacccttggatccccacagtttggtcctcctcccagctacccctttatagtatgacgagttaacaagttggtgacctgcacaaagcgagacacagctatttaatctcttgccagatatcgcccctcttggtgcgatgctgtacaggtctctgtaaaaagtccttgctgtctcagcagccaatcaacttatagtttatttttttctgggtttttgttttgttttgttttctttctaatcgaggtgtgaaaaagttctaggttcagttgaagttctgatgaagaaacacaattgagattttttcagtgataaaatctgcatatttgtatttcaacaatgtagctaaaacttgatgtaaattcctcctttttttccttttttggcttaatgaatatcatttattcagtatgaaatctttatactatatgttccacgtgttaagaataaatgtacattaaatcttggtaagacttt

SEQ ID NO: 40 - DNA, 8585 bp, Homo sapiens
cagaaagcggagagtcacagcggggccaggccctggggagcggagcctccaccgcccccctcattcccaggcaagggcttggggggaatgagccgggagagccgggtcccgagcctacagagccgggagcagctgagccgccggcgcctcggccgccgccgccgcctcctcctcctccgccgccgccagcccggagcctgagccggcggggcgggggggagaggagcgagcgcagcgcagcagcggagccccgcgaggcccgcccgggcgggtggggagggcagcccgggggactgggccccggggcggggtgggagggggggagaagacgaagacagggccgggtctctccgcggacgagacagcggggatcatggccgcgcaggtcgcccccgccgccgccagcagcctgggcaacccgccgccgccgccgccctcggagctgaagaaagccgagcagcagcagcgggaggaggcggggggcgaggcggcggcggcggcagcggccgagcgcggggaaatgaaggcagccgccgggcaggaaagcgagggccccgccgtggggccgccgcagccgctgggaaaggagctgcaggacggggccgagagcaatgggggtggcggcggcggcggagccggcagcggcggcgggcccggcgcggagccggacctgaagaactcgaacgggaacgcgggccctaggcccgccctgaacaataacctcacggagccgcccggcggcggcggtggcggcagcagcgatggggtgggggcgcctcctcactcagccgcggccgccttgccgcccccagcctacggcttcgggcaaccctacggccggagcccgtctgccgtcgccgccgccgcggccgccgtcttccaccaacaacatggcggacaacaaagccctggcctggcagcgctgcagagcggcggcggcgggggcctggagccctacgcggggccccagcagaactctcacgaccacggcttccccaaccaccagtacaactcctactaccccaaccgcagcgcctaccccccgcccgccccggcctacgcgctgagctccccgagaggtggcactccgggctccggcgcggcggcggctgccggctccaagccgcctccctcctccagcgcctccgcctcctcgtcgtcttcgtccttcgctcagcagcgcttcggggccatggggggaggcggcccctccgcggccggcgggggaactccccagcccaccgccacccccaccctcaaccaactgctcacgtcgcccagctcggcccggggctaccagggctaccccgggggcgactacagtggcgggccccaggacgggggcgccggcaagggcccggcggacatggcctcgcagtgttggggggctgcggcggcggcagctgcggcggcggccgcctcgggaggggcccaacaaaggagccaccacgcgcccatgagccccgggagcagcggcggcggggggcagccgctcgcccggacccctcagccatccagtccaatggatcagatgggcaagatgagacctcagccatatggcgggactaacccatactcgcagcaacagggacctccgtcaggaccgcagcaaggacatgggtacccagggcagccatacgggtcccagaccccgcagcggtacccgatgaccatgcagggccgggcgcagagtgccatgggcggcctctcttatacacagcagattcctccttatggacaacaaggccccagcgggtatggtcaacagggccagactccatattacaaccagcaaagtcctcaccctcagcagcagcagccaccctactcccagcaaccaccgtcccagacccctcatgcccaaccttcgtatcagcagcagccacagtctcaaccaccacagctccagtcctctcagcctccatactcccagcagccatcccagcctccacatcagcagtccccggctccatacccctcccagcagtcgacgacacagcagcacccccagagccagcccccctactcacagccacaggctcagtctccttaccagcagcagcaacctcagcagccagcaccctcgacgctctcccagcaggctgcgtatcctcagccccagtctcagcagtcccagcaaactgcctattcccagcagcgcttccctccaccgcaggagctatctcaagattcatttgggtctcaggcatcctcagccccctcaatgacctccagtaagggagggcaagaagatatgaacctgagccttcagtcaagaccctccagcttgcctgatctatctggttcaatagatgacctccccatggggacagaaggagctctgagtcctggagtgagcacatcagggatttccagcagccaaggagagcagagtaatccagctcagtctcctttctctcctcatacctcccctcacctgcctggcatccgaggcccttccccgtcccctgttggctctcccgccagtgttgctcagtctcgctcaggaccactctcgcctgctgcagtgccaggcaaccagatgccacctcggccacccagtggccagtcggacagcatcatgcatccttccatgaaccaatcaagcattgcccaagatcgaggttatatgcagaggaacccccagatgccccagtacagttccccccagcccggctcagccttatctccgcgtcagccttccggaggacagatacacacaggcatgggctcctaccagcagaactccatggggagctatggtccccaggggggtcagtatggcccacaaggtggctaccccaggcagccaaactataatgccttgcccaatgccaactaccccagtgcaggcatggctggaggcataaaccccatgggtgccggaggtcaaatgcatggacagcctggcatcccaccttatggcacactccctccagggaggatgagtcacgcctccatgggcaaccggccttatggccctaacatggccaatatgccacctcaggttgggtcagggatgtgtcccccaccagggggcatgaaccggaaaacccaagaaactgctgtcgccatgcatgttgctgccaactctatccaaaacaggccgccaggctaccccaatatgaatcaagggggcatgatgggaactggacctccttatggacaagggattaatagtatggctggcatgatcaaccctcagggacccccatattccatgggtggaaccatggccaacaattctgcagggatggcagccagcccagagatgatgggccttggggatgtaaagttaactccagccaccaaaatgaacaacaaggcagatgggacacccaagacagaatccaaatccaagaaatccagttcttctactacaaccaatgagaagatcaccaagttgtatgagctgggtggtgagcctgagaggaagatgtgggtggaccgttatctggccttcactgaggagaaggccatgggcatgacaaatctgcctgctgtgggtaggaaacctctggacctctatcgcctctatgtgtctgtgaaggagattggtggattgactcaggtcaacaagaacaaaaaatggcgggaacttgcaaccaacctcaatgtgggcacatcaagcagtgctgccagctccttgaaaaagcagtatatccagtgtctctatgcctttgaatgcaagattgaacggggagaagaccctcccccagacatctttgcagctgctgattccaagaagtcccagcccaagatccagcctccctctcctgcgggatcaggatctatgcaggggccccagactccccagtcaaccagcagttccatggcagaaggaggagacttaaagccaccaactccagcatccacaccacacagtcagatccccccattgccaggcatgagcaggagcaattcagttgggatccaggatgcctttaatgatggaagtgactccacattccagaagcggaattccatgactccaaaccctgggtatcagcccagtatgaatacctctgacatgatggggcgcatgtcctatgagccaaataaggatccttatggcagcatgaggaaagctccagggagtgatcccttcatgtcctcagggcagggccccaacggcgggatgggtgacccctacagtcgtgctgccggccctgggctaggaaatgtggcgatgggaccacgacagcactatccctatggaggtccttatgacagagtgaggacggagcctggaatagggcctgagggaaacatgagcactggggccccacagccgaatctcatgccttccaacccagactcggggatgtattctcctagccgctaccccccgcagcagcagtagcagcagcagcaacgacatgattcctatggcaatcagttctccacccaaggcaccccttctggcagccccttccccagccagcagactacaatgtatcaacagcaacagcagaattacaagcggccaatggatggcacatatggccctcctgccaagcggcacgaaggggagatgtacagcgtgccatacagcactgggcaggggcagcctcagcagcagcagttgcccccagcccagccccagcctgccagccagcaacaagctgcccagccttcccctcagcaagatgtatacaaccagtatggcaatgcctatcctgccactgccacagctgctactgagcgccgaccagcaggcggcccccagaaccaatttccattccagtttggccgagaccgtgtctctgcaccccctggcaccaatgcccagcaaaacatgccaccacaaatgatgggcggccccatacaggcatcagctgaggttgctcagcaaggcaccatgtggcaggggcgtaatgacatgacctataattatgccaacaggcagagcacgggctctgccccccagggccccgcctatcatggcgtgaaccgaacagatgaaatgctgcacacagatcagagggccaaccacgaaggctcgtggccttcccatggcacacgccagcccccatatggtccctctgcccctgtgccccccatgacaaggccccctccatctaactaccagcccccaccaagcatgcagaatcacattcctcaggtatccagccctgctcccctgccccggccaatggagaaccgcacctctcctagcaagtctccattcctgcactctgggatgaaaatgcagaaggcaggtcccccagtacctgcctcgcacatagcacctgcccctgtgcagccccccatgattcggcgggatatcaccttcccacctggctctgttgaagccacacagcctgtgttgaagcagaggaggcggctcacaatgaaagacattggaaccccggaggcatggcgggtaatgatgtccctcaagtctggtctcctggcagagagcacatgggcattagataccatcaacatcctgctgtatgatgacaacagcatcatgaccttcaacctcagtcagctcccagggttgctagagctccttgtagaatatttccgacgatgcctgattgagatctttggcattttaaaggagtatgaggtgggtgacccaggacagagaacgctactggatcctgggaggttcagcaaggtgtctagtccagctcccatggagggtggggaagaagaagaagaacttctaggtcctaaactagaagaggaagaagaagaggaagtagttgaaaatgatgaggagatagccttttcaggcaaggacaagccagcttcagagaatagtgaggagaagctgatcagtaagtttgacaagcttccagtaaagatcgtacagaagaatgatccatttgtggtggactgctcagataagcttgggcgtgtgcaggagtttgacagtggcctgctgcactggcggattggtgggggggacaccactgagcatatccagacccacttcgagagcaagacagagctgctgccttcccggcctcacgcaccctgcccaccagcccctcggaagcatgtgacaacagcagagggtacaccagggacaacagaccaggaggggcccccacctgatggacctccagaaaaacggatcacagccactatggatgacatgttgtctactcggtctagcaccttgaccgaggatggagctaagagttcagaggccatcaaggagagcagcaagtttccatttggcattagcccagcacagagccaccggaacatcaagatcctagaggacgaaccccacagtaaggatgagaccccactgtgtacccttctggactggcaggattctcttgccaagcgctgcgtctgtgtgtccaataccattcgaagcctgtcatttgtgccaggcaatgactttgagatgtccaaacacccagggctgctgctcatcctgggcaagctgatcctgctgcaccacaagcacccagaacggaagcaggcaccactaacttatgaaaaggaggaggaacaggaccaaggggtgagctgcaacaaagtggagtggtggtgggactgcttggagatgctccgggaaaacaccttggttacactcgccaacatctcggggcagttggacctatctccataccccgagagcatttgcctgcctgtcctggacggactcctacactgggcagtttgcccttcagctgaagcccaggaccccttttccaccctgggccccaatgccgtcctttccccgcagagactggtcttggaaaccctcagcaaactcagcatccaggacaacaatgtggacctgattctggccacaccccccttcagccgcctggagaagttgtatagcactatggtgcgcttcctcagtgaccgaaagaacccggtgtgccgggagatggctgtggtactgctggccaacctggctcagggggacagcctggcagctcgtgccattgcagtgcagaagggcagtatcggcaacctcctgggcttcctagaggacagccttgccgccacacagttccagcagagccaggccagcctcctccacatgcagaacccaccctttgagccaactagtgtggacatgatgcggcgggctgcccgcgcgctgcttgccttggccaaggtggacgagaaccactcagagtttactctgtacgaatcacggctgttggacatctcggtatcaccgttgatgaactcattggtttcacaagtcatttgtgatgtactgtttttgattggccagtcatgacagccgtgggacacctcccccccccgtgtgtgtgtgcgtgtgtggagaacttagaaactgactgttgccctttatttatgcaaaaccacctcagaatccagtttaccctgtgctgtccagcttctcccttgggaaaaagtctctcctgtttctctctcctccttccacctcccctccctccatcacctcacgcctttctgttccttgtcctcaccttactcccctcaggaccctaccccaccctctttgaaaagacaaagctctgcctacatagaagactttttttattttaaccaaagttactgttgtttacagtgagtttggggaaaaaaaataaaataaaaatggctttcccagtccttgcatcaacgggatgccacatttcataactgtttttaatggtaaaaaaaaaaaaaaaaaatacaaaaaaaaattctgaaggacaaaaaaggtgactgctgaactgtgtgtggtttattgttgtacattcacaatcttgcaggagccaagaagttcgcagttgtgaacagaccctgttcactggagaggcctgtgcagtagagtgtagaccctttcatgtactgtactgtacacctgatactgtaaacatactgtaataataatgtctcacatggaaacagaaaacgctgggtcagcagcaagctgtagtttttaaaaatgtttttagttaaacgttgaggagaaaaaaaaaaaaggcttttcccccaaagtatcatgtgtgaacctacaacaccctgacctctttctctcctccttgattgtatgaataaccctgagatcacctcttagaactggttttaacctttagctgcagcggctacgctgccacgtgtgtatatatatgacgttgtacattgcacatacccttggatccccacagtttggtcctcctcccagctacccctttatagtatgacgagttaacaagttggtgacctgcacaaagcgagacacagctatttaatctcttgccagatatcgcccctcttggtgcgatgctgtacaggtctctgtaaaaagtccttgctgtctcagcagccaatcaacttatagtttatttttttctgggtttttgttttgttttgttttctttctaatcgaggtgtgaaaaagttctaggttcagttgaagttctgatgaagaaacacaattgagattttttcagtgataaaatctgcatatttgtatttcaacaatgtagctaaaacttgatgtaaattcctcctttttttccttttttggcttaatgaatatcatttattcagtatgaaatctttatactatatgttccacgtgttaagaataaatgtacattaaatcttggtaagacttt

SEQ ID NO: 41 - DNA, 8585 bp, Homo sapiens
cagaaagcggagagtcacagcggggccaggccctggggagcggagcctccaccgcccccctcattcccaggcaagggcttggggggaatgagccgggagagccgggtcccgagcctacagagccgggagcagctgagccgccggcgcctcggccgccgccgccgcctcctcctcctccgccgccgccagcccggagcctgagccggcggggcgggggggagaggagcgagcgcagcgcagcagcggagccccgcgaggcccgcccgggcgggtggggagggcagcccgggggactgggccccggggcggggtgggagggggggagaagacgaagacagggccgggtctctccgcggacgagacagcggggatcatggccgcgcaggtcgcccccgccgccgccagcagcctgggcaacccgccgccgccgccgccctcggagctgaagaaagccgagcagcagcagcgggaggaggcggggggcgaggcggcggcggcggcagcggccgagcgcggggaaatgaaggcagccgccgggcaggaaagcgagggccccgccgtggggccgccgcagccgctgggaaaggagctgcaggacggggccgagagcaatgggggtggcggcggcggcggagccggcagcggcggcgggcccggcgcggagccggacctgaagaactcgaacgggaacgcgggccctaggcccgccctgaacaataacctcacggagccgcccggcggcggcggtggcggcagcagcgatggggtgggggcgcctcctcactcagccgcggccgccttgccgcccccagcctacggcttcgggcaaccctacggccggagcccgtctgccgtcgccgccgccgcggccgccgtcttccaccaacaacatggcggacaacaaagccctggcctggcagcgctgcagagcggcggcggcgggggcctggagccctacgcggggccccagcagaactctcacgaccacggcttccccaaccaccagtacaactcctactaccccaaccgcagcgcctaccccccgcccgccccggcctacgcgctgagctccccgagaggtggcactccgggctccggcgcggcggcggctgccggctccaagccgcctccctcctccagcgcctccgcctcctcgtcgtcttcgtccttcgctcagcagcgcttcggggccatggggggaggcggcccctccgcggccggcgggggaactccccagcccaccgccacccccaccctcaaccaactgctcacgtcgcccagctcggcccggggctaccagggctaccccgggggcgactacagtggcgggccccaggacgggggcgccggcaagggcccggcggacatggcctcgcagtgttggggggctgcggcggcggcagctgcggcggcggccgcctcgggaggggcccaacaaaggagccaccacgcgcccatgagccccgggagcagcggcggcggggggcagccgctcgcccggacccctcagccatccagtccaatggatcagatgggcaagatgagacctcagccatatggcgggactaacccatactcgcagcaacagggacctccgtcaggaccgcagcaaggacatgggtacccagggcagccatacgggtcccagaccccgcagcggtacccgatgaccatgcagggccgggcgcagagtgccatgggcggcctctcttatacacagcagattcctccttatggacaacaaggccccagcgggtatggtcaacagggccagactccatattacaaccagcaaagtcctcaccctcagcagcagcagccaccctactcccagcaaccaccgtcccagacccctcatgcccaaccttcgtatcagcagcagccacagtctcaaccaccacagctccagtcctctcagcctccatactcccagcagccatcctagcctccacatcagcagtccccggctccatacccctcccagcagtcgacgacacagcagcacccccagagccagcccccctactcacagccacaggctcagtctccttaccagcagcagcaacctcagcagccagcaccctcgacgctctcccagcaggctgcgtatcctcagccccagtctcagcagtcccagcaaactgcctattcccagcagcgcttccctccaccgcaggagctatctcaagattcatttgggtctcaggcatcctcagccccctcaatgacctccagtaagggagggcaagaagatatgaacctgagccttcagtcaagaccctccagcttgcctgatctatctggttcaatagatgacctccccatggggacagaaggagctctgagtcctggagtgagcacatcagggatttccagcagccaaggagagcagagtaatccagctcagtctcctttctctcctcatacctcccctcacctgcctggcatccgaggcccttccccgtcccctgttggctctcccgccagtgttgctcagtctcgctcaggaccactctcgcctgctgcagtgccaggcaaccagatgccacctcggccacccagtggccagtcggacagcatcatgcatccttccatgaaccaatcaagcattgcccaagatcgaggttatatgcagaggaacccccagatgccccagtacagttccccccagcccggctcagccttatctccgcgtcagccttccggaggacagatacacacaggcatgggctcctaccagcagaactccatggggagctatggtccccaggggggtcagtatggcccacaaggtggctaccccaggcagccaaactataatgccttgcccaatgccaactaccccagtgcaggcatggctggaggcataaaccccatgggtgccggaggtcaaatgcatggacagcctggcatcccaccttatggcacactccctccagggaggatgagtcacgcctccatgggcaaccggccttatggccctaacatggccaatatgccacctcaggttgggtcagggatgtgtcccccaccagggggcatgaaccggaaaacccaagaaactgctgtcgccatgcatgttgctgccaactctatccaaaacaggccgccaggctaccccaatatgaatcaagggggcatgatgggaactggacctccttatggacaagggattaatagtatggctggcatgatcaaccctcagggacccccatattccatgggtggaaccatggccaacaattctgcagggatggcagccagcccagagatgatgggccttggggatgtaaagttaactccagccaccaaaatgaacaacaaggcagatgggacacccaagacagaatccaaatccaagaaatccagttcttctactacaaccaatgagaagatcaccaagttgtatgagctgggtggtgagcctgagaggaagatgtgggtggaccgttatctggccttcactgaggagaaggccatgggcatgacaaatctgcctgctgtgggtaggaaacctctggacctctatcgcctctatgtgtctgtgaaggagattggtggattgactcaggtcaacaagaacaaaaaatggcgggaacttgcaaccaacctcaatgtgggcacatcaagcagtgctgccagctccttgaaaaagcagtatatccagtgtctctatgcctttgaatgcaagattgaacggggagaagaccctcccccagacatctttgcagctgctgattccaagaagtcccagcccaagatccagcctccctctcctgcgggatcaggatctatgcaggggccccagactccccagtcaaccagcagttccatggcagaaggaggagacttaaagccaccaactccagcatccacaccacacagtcagatccccccattgccaggcatgagcaggagcaattcagttgggatccaggatgcctttaatgatggaagtgactccacattccagaagcggaattccatgactccaaaccctgggtatcagcccagtatgaatacctctgacatgatggggcgcatgtcctatgagccaaataaggatccttatggcagcatgaggaaagctccagggagtgatcccttcatgtcctcagggcagggccccaacggcgggatgggtgacccctacagtcgtgctgccggccctgggctaggaaatgtggcgatgggaccacgacagcactatccctatggaggtccttatgacagagtgaggacggagcctggaatagggcctgagggaaacatgagcactggggccccacagccgaatctcatgccttccaacccagactcggggatgtattctcctagccgctaccccccgcagcagcagcagcagcagcagcaacgacatgattcctatggcaatcagttctccacccaaggcaccccttctggcagccccttccccagccagcagactacaatgtatcaacagcaacagcagaattacaagcggccaatggatggcacatatggccctcctgccaagcggcacgaaggggagatgtacagcgtgccatacagcactgggcaggggcagcctcagcagcagcagttgcccccagcccagccccagcctgccagccagcaacaagctgcccagccttcccctcagcaagatgtatacaaccagtatggcaatgcctatcctgccactgccacagctgctactgagcgccgaccagcaggcggcccccagaaccaatttccattccagtttggccgagaccgtgtctctgcaccccctggcaccaatgcccagcaaaacatgccaccacaaatgatgggcggccccatacaggcatcagctgaggttgctcagcaaggcaccatgtggcaggggcgtaatgacatgacctataattatgccaacaggcagagcacgggctctgccccccagggccccgcctatcatggcgtgaaccgaacagatgaaatgctgcacacagatcagagggccaaccacgaaggctcgtggccttcccatggcacacgccagcccccatatggtccctctgcccctgtgccccccatgacaaggccccctccatctaactaccagcccccaccaagcatgcagaatcacattcctcaggtatccagccctgctcccctgccccggccaatggagaaccgcacctctcctagcaagtctccattcctgcactctgggatgaaaatgcagaaggcaggtcccccagtacctgcctcgcacatagcacctgcccctgtgcagccccccatgattcggcgggatatcaccttcccacctggctctgttgaagccacacagcctgtgttgaagcagaggaggcggctcacaatgaaagacattggaaccccggaggcatggcgggtaatgatgtccctcaagtctggtctcctggcagagagcacatgggcattagataccatcaacatcctgctgtatgatgacaacagcatcatgaccttcaacctcagtcagctcccagggttgctagagctccttgtagaatatttccgacgatgcctgattgagatctttggcattttaaaggagtatgaggtgggtgacccaggacagagaacgctactggatcctgggaggttcagcaaggtgtctagtccagctcccatggagggtggggaagaagaagaagaacttctaggtcctaaactagaagaggaagaagaagaggaagtagttgaaaatgatgaggagatagccttttcaggcaaggacaagccagcttcagagaatagtgaggagaagctgatcagtaagtttgacaagcttccagtaaagatcgtacagaagaatgatccatttgtggtggactgctcagataagcttgggcgtgtgcaggagtttgacagtggcctgctgcactggcggattggtgggggggacaccactgagcatatccagacccacttcgagagcaagacagagctgctgccttcccggcctcacgcaccctgcccaccagcccctcggaagcatgtgacaacagcagagggtacaccagggacaacagaccaggaggggcccccacctgatggacctccagaaaaacggatcacagccactatggatgacatgttgtctactcggtctagcaccttgaccgaggatggagctaagagttcagaggccatcaaggagagcagcaagtttccatttggcattagcccagcacagagccaccggaacatcaagatcctagaggacgaaccccacagtaaggatgagaccccactgtgtacccttctggactggcaggattctcttgccaagcgctgcgtctgtgtgtccaataccattcgaagcctgtcatttgtgccaggcaatgactttgagatgtccaaacacccagggctgctgctcatcctgggcaagctgatcctgctgcaccacaagcacccagaacggaagcaggcaccactaacttatgaaaaggaggaggaacaggaccaaggggtgagctgcaacaaagtggagtggtggtgggactgcttggagatgctccgggaaaacaccttggttacactcgccaacatctcggggcagttggacctatctccataccccgagagcatttgcctgcctgtcctggacggactcctacactgggcagtttgcccttcagctgaagcccaggaccccttttccaccctgggccccaatgccgtcctttccccgcagagactggtcttggaaaccctcagcaaactcagcatccaggacaacaatgtggacctgattctggccacaccccccttcagccgcctggagaagttgtatagcactatggtgcgcttcctcagtgaccgaaagaacccggtgtgccgggagatggctgtggtactgctggccaacctggctcagggggacagcctggcagctcgtgccattgcagtgcagaagggcagtatcggcaacctcctgggcttcctagaggacagccttgccgccacacagttccagcagagccaggccagcctcctccacatgcagaacccaccctttgagccaactagtgtggacatgatgcggcgggctgcccgcgcgctgcttgccttggccaaggtggacgagaaccactcagagtttactctgtacgaatcacggctgttggacatctcggtatcaccgttgatgaactcattggtttcacaagtcatttgtgatgtactgtttttgattggccagtcatgacagccgtgggacacctcccccccccgtgtgtgtgtgcgtgtgtggagaacttagaaactgactgttgccctttatttatgcaaaaccacctcagaatccagtttaccctgtgctgtccagcttctcccttgggaaaaagtctctcctgtttctctctcctccttccacctcccctccctccatcacctcacgcctttctgttccttgtcctcaccttactcccctcaggaccctaccccaccctctttgaaaagacaaagctctgcctacatagaagactttttttattttaaccaaagttactgttgtttacagtgagtttggggaaaaaaaataaaataaaaatggctttcccagtccttgcatcaacgggatgccacatttcataactgtttttaatggtaaaaaaaaaaaaaaaaaatacaaaaaaaaattctgaaggacaaaaaaggtgactgctgaactgtgtgtggtttattgttgtacattcacaatcttgcaggagccaagaagttcgcagttgtgaacagaccctgttcactggagaggcctgtgcagtagagtgtagaccctttcatgtactgtactgtacacctgatactgtaaacatactgtaataataatgtctcacatggaaacagaaaacgctgggtcagcagcaagctgtagtttttaaaaatgtttttagttaaacgttgaggagaaaaaaaaaaaaggcttttcccccaaagtatcatgtgtgaacctacaacaccctgacctctttctctcctccttgattgtatgaataaccctgagatcacctcttagaactggttttaacctttagctgcagcggctacgctgccacgtgtgtatatatatgacgttgtacattgcacatacccttggatccccacagtttggtcctcctcccagctacccctttatagtatgacgagttaacaagttggtgacctgcacaaagcgagacacagctatttaatctcttgccagatatcgcccctcttggtgcgatgctgtacaggtctctgtaaaaagtccttgctgtctcagcagccaatcaacttatagtttatttttttctgggtttttgttttgttttgttttctttctaatcgaggtgtgaaaaagttctaggttcagttgaagttctgatgaagaaacacaattgagattttttcagtgataaaatctgcatatttgtatttcaacaatgtagctaaaacttgatgtaaattcctcctttttttccttttttggcttaatgaatatcatttattcagtatgaaatctttatactatatgttccacgtgttaagaataaatgtacattaaatcttggtaagacttt

SEQ ID NO: 42 - DNA, 8585 bp, Homo sapiens
cagaaagcggagagtcacagcggggccaggccctggggagcggagcctccaccgcccccctcattcccaggcaagggcttggggggaatgagccgggagagccgggtcccgagcctacagagccgggagcagctgagccgccggcgcctcggccgccgccgccgcctcctcctcctccgccgccgccagcccggagcctgagccggcggggcgggggggagaggagcgagcgcagcgcagcagcggagccccgcgaggcccgcccgggcgggtggggagggcagcccgggggactgggccccggggcggggtgggagggggggagaagacgaagacagggccgggtctctccgcggacgagacagcggggatcatggccgcgcaggtcgcccccgccgccgccagcagcctgggcaacccgccgccgccgccgccctcggagctgaagaaagccgagcagcagcagcgggaggaggcggggggcgaggcggcggcggcggcagcggccgagcgcggggaaatgaaggcagccgccgggcaggaaagcgagggccccgccgtggggccgccgcagccgctgggaaaggagctgcaggacggggccgagagcaatgggggtggcggcggcggcggagccggcagcggcggcgggcccggcgcggagccggacctgaagaactcgaacgggaacgcgggccctaggcccgccctgaacaataacctcacggagccgcccggcggcggcggtggcggcagcagcgatggggtgggggcgcctcctcactcagccgcggccgccttgccgcccccagcctacggcttcgggcaaccctacggccggagcccgtctgccgtcgccgccgccgcggccgccgtcttccaccaacaacatggcggacaacaaagccctggcctggcagcgctgcagagcggcggcggcgggggcctggagccctacgcggggccccagcagaactctcacgaccacggcttccccaaccaccagtacaactcctactaccccaaccgcagcgcctaccccccgcccgccccggcctacgcgctgagctccccgagaggtggcactccgggctccggcgcggcggcggctgccggctccaagccgcctccctcctccagcgcctccgcctcctcgtcgtcttcgtccttcgctcagcagcgcttcggggccatggggggaggcggcccctccgcggccggcgggggaactccccagcccaccgccacccccaccctcaaccaactgctcacgtcgcccagctcggcccggggctaccagggctaccccgggggcgactacagtggcgggccccaggacgggggcgccggcaagggcccggcggacatggcctcgcagtgttggggggctgcggcggcggcagctgcggcggcggccgcctcgggaggggcccaacaaaggagccaccacgcgcccatgagccccgggagcagcggcggcggggggcagccgctcgcccggacccctcagccatccagtccaatggatcagatgggcaagatgagacctcagccatatggcgggactaacccatactcgcagcaacagggacctccgtcaggaccgcagcaaggacatgggtacccagggcagccatacgggtcccagaccccgcagcggtacccgatgaccatgcagggccgggcgcagagtgccatgggcggcctctcttatacacagcagattcctccttatggacaacaaggccccagcgggtatggtcaacagggccagactccatattacaaccagcaaagtcctcaccctcagcagcagcagccaccctactcccagcaaccaccgtcccagacccctcatgcccaaccttcgtatcagcagcagccacagtctcaaccaccacagctccagtcctctcagcctccatactcccagcagccatcccagcctccacatcagcagtccccggctccatacccctcccagcagtcgacgacacagcagcacccccagagccagcccccctactcacagccacaggctcagtctccttaccagcagcagcaacctcagcagccagcaccctcgacgctctcccagcaggctgcgtatcctcagccccagtctcagcagtcccagcaaactgcctattcccagcagcgcttccctccaccgcaggagctatctcaagattcatttgggtctcaggcatcctcagccccctcaatgacctccagtaagggagggcaagaagatatgaacctgagccttcagtcaagaccctccagcttgcctgatctatctggttcaatagatgacctccccatggggacagaaggagctctgagtcctggagtgagcacatcagggatttccagcagccaaggagagcagagtaatccagctcagtctcctttctctcctcatacctcccctcacctgcctggcatccgaggcccttccccgtcccctgttggctctcccgccagtgttgctcagtctcgctcaggaccactctcgcctgctgcagtgccaggcaaccagatgccacctcggccacccagtggccagtcggacagcatcatgcatccttccatgaaccaatcaagcattgcccaagatcgaggttatatgcagaggaacccccagatgccccagtacagttccccccagcccggctcagccttatctccgcgtcagccttccggaggacagatacacacaggcatgggctcctaccagcagaactccatggggagctatggtccccaggggggtcagtatggcccacaaggtggctaccccaggcagccaaactataatgccttgcccaatgccaactaccccagtgcaggcatggctggaggcataaaccccatgggtgccggaggtcaaatgcatggacagcctggcatcccaccttatggcacactccctccagggaggatgagtcacgcctccatgggcaaccggccttatggccctaacatggccaatatgccacctcaggttgggtcagggatgtgtcccccaccagggggcatgaaccggaaaacccaagaaactgctgtcgccatgcatgttgctgccaactctatccaaaacaggccgccaggctaccccaatatgaatcaagggggcatgatgggaactggacctccttatggacaagggattaatagtatggttggcatgatcaaccctcagggacccccatattccatgggtggaaccatggccaacaattctgcagggatggcagccagcccagagatgatgggccttggggatgtaaagttaactccagccaccaaaatgaacaacaaggcagatgggacacccaagacagaatccaaatccaagaaatccagttcttctactacaaccaatgagaagatcaccaagttgtatgagctgggtggtgagcctgagaggaagatgtgggtggaccgttatctggccttcactgaggagaaggccatgggcatgacaaatctgcctgctgtgggtaggaaacctctggacctctatcgcctctatgtgtctgtgaaggagattggtggattgactcaggtcaacaagaacaaaaaatggcgggaacttgcaaccaacctcaatgtgggcacatcaagcagtgctgccagctccttgaaaaagcagtatatccagtgtctctatgcctttgaatgcaagattgaacggggagaagaccctcccccagacatctttgcagctgctgattccaagaagtcccagcccaagatccagcctccctctcctgcgggatcaggatctatgcaggggccccagactccccagtcaaccagcagttccatggcagaaggaggagacttaaagccaccaactccagcatccacaccacacagtcagatccccccattgccaggcatgagcaggagcaattcagttgggatccaggatgcctttaatgatggaagtgactccacattccagaagcggaattccatgactccaaaccctgggtatcagcccagtatgaatacctctgacatgatggggcgcatgtcctatgagccaaataaggatccttatggcagcatgaggaaagctccagggagtgatcccttcatgtcctcagggcagggccccaacggcgggatgggtgacccctacagtcgtgctgccggccctgggctaggaaatgtggcgatgggaccacgacagcactatccctatggaggtccttatgacagagtgaggacggagcctggaatagggcctgagggaaacatgagcactggggccccacagccgaatctcatgccttccaacccagactcggggatgtattctcctagccgctaccccccgcagcagcagcagcagcagcagcaacgacatgattcctatggcaatcagttctccacccaaggcaccccttctggcagccccttccccagccagcagactacaatgtatcaacagcaacagcagaattacaagcggccaatggatggcacatatggccctcctgccaagcggcacgaaggggagatgtacagcgtgccatacagcactgggcaggggcagcctcagcagcagcagttgcccccagcccagccccagcctgccagccagcaacaagctgcccagccttcccctcagcaagatgtatacaaccagtatggcaatgcctatcctgccactgccacagctgctactgagcgccgaccagcaggcggcccccagaaccaatttccattccagtttggccgagaccgtgtctctgcaccccctggcaccaatgcccagcaaaacatgccaccacaaatgatgggcggccccatacaggcatcagctgaggttgctcagcaaggcaccatgtggcaggggcgtaatgacatgacctataattatgccaacaggcagagcacgggctctgccccccagggccccgcctatcatggcgtgaaccgaacagatgaaatgctgcacacagatcagagggccaaccacgaaggctcgtggccttcccatggcacacgccagcccccatatggtccctctgcccctgtgccccccatgacaaggccccctccatctaactaccagcccccaccaagcatgcagaatcacattcctcaggtatccagccctgctcccctgccccggccaatggagaaccgcacctctcctagcaagtctccattcctgcactctgggatgaaaatgcagaaggcaggtcccccagtacctgcctcgcacatagcacctgcccctgtgcagccccccatgattcggcgggatatcaccttcccacctggctctgttgaagccacacagcctgtgttgaagcagaggaggcggctcacaatgaaagacattggaaccccggaggcatggcgggtaatgatgtccctcaagtctggtctcctggcagagagcacatgggcattagataccatcaacatcctgctgtatgatgacaacagcatcatgaccttcaacctcagtcagctcccagggttgctagagctccttgtagaatatttccgacgatgcctgattgagatctttggcattttaaaggagtatgaggtgggtgacccaggacagagaacgctactggatcctgggaggttcagcaaggtgtctagtccagctcccatggagggtggggaagaagaagaagaacttctaggtcctaaactagaagaggaagaagaagaggaagtagttgaaaatgatgaggagatagccttttcaggcaaggacaagccagcttcagagaatagtgaggagaagctgatcagtaagtttgacaagcttccagtaaagatcgtacagaagaatgatccatttgtggtggactgctcagataagcttgggcgtgtgcaggagtttgacagtggcctgctgcactggcggattggtgggggggacaccactgagcatatccagacccacttcgagagcaagacagagctgctgccttcccggcctcacgcaccctgcccaccagcccctcggaagcatgtgacaacagcagagggtacaccagggacaacagaccaggaggggcccccacctgatggacctccagaaaaacggatcacagccactatggatgacatgttgtctactcggtctagcaccttgaccgaggatggagctaagagttcagaggccatcaaggagagcagcaagtttccatttggcattagcccagcacagagccaccggaacatcaagatcctagaggacgaaccccacagtaaggatgagaccccactgtgtacccttctggactggcaggattctcttgccaagcgctgcgtctgtgtgtccaataccattcgaagcctgtcatttgtgccaggcaatgactttgagatgtccaaacacccagggctgctgctcatcctgggcaagctgatcctgctgcaccacaagcacccagaacggaagcaggcaccactaacttatgaaaaggaggaggaacaggaccaaggggtgagctgcaacaaagtggagtggtggtgggactgcttggagatgctccgggaaaacaccttggttacactcgccaacatctcggggcagttggacctatctccataccccgagagcatttgcctgcctgtcctggacggactcctacactgggcagtttgcccttcagctgaagcccaggaccccttttccaccctgggccccaatgccgtcctttccccgcagagactggtcttggaaaccctcagcaaactcagcatccaggacaacaatgtggacctgattctggccacaccccccttcagccgcctggagaagttgtatagcactatggtgcgcttcctcagtgaccgaaagaacccggtgtgccgggagatggctgtggtactgctggccaacctggctcagggggacagcctggcagctcgtgccattgcagtgcagaagggcagtatcggcaacctcctgggcttcctagaggacagccttgccgccacacagttccagcagagccaggccagcctcctccacatgcagaacccaccctttgagccaactagtgtggacatgatgcggcgggctgcccgcgcgctgcttgccttggccaaggtggacgagaaccactcagagtttactctgtacgaatcacggctgttggacatctcggtatcaccgttgatgaactcattggtttcacaagtcatttgtgatgtactgtttttgattggccagtcatgacagccgtgggacacctcccccccccgtgtgtgtgtgcgtgtgtggagaacttagaaactgactgttgccctttatttatgcaaaaccacctcagaatccagtttaccctgtgctgtccagcttctcccttgggaaaaagtctctcctgtttctctctcctccttccacctcccctccctccatcacctcacgcctttctgttccttgtcctcaccttactcccctcaggaccctaccccaccctctttgaaaagacaaagctctgcctacatagaagactttttttattttaaccaaagttactgttgtttacagtgagtttggggaaaaaaaataaaataaaaatggctttcccagtccttgcatcaacgggatgccacatttcataactgtttttaatggtaaaaaaaaaaaaaaaaaatacaaaaaaaaattctgaaggacaaaaaaggtgactgctgaactgtgtgtggtttattgttgtacattcacaatcttgcaggagccaagaagttcgcagttgtgaacagaccctgttcactggagaggcctgtgcagtagagtgtagaccctttcatgtactgtactgtacacctgatactgtaaacatactgtaataataatgtctcacatggaaacagaaaacgctgggtcagcagcaagctgtagtttttaaaaatgtttttagttaaacgttgaggagaaaaaaaaaaaaggcttttcccccaaagtatcatgtgtgaacctacaacaccctgacctctttctctcctccttgattgtatgaataaccctgagatcacctcttagaactggttttaacctttagctgcagcggctacgctgccacgtgtgtatatatatgacgttgtacattgcacatacccttggatccccacagtttggtcctcctcccagctacccctttatagtatgacgagttaacaagttggtgacctgcacaaagcgagacacagctatttaatctcttgccagatatcgcccctcttggtgcgatgctgtacaggtctctgtaaaaagtccttgctgtctcagcagccaatcaacttatagtttatttttttctgggtttttgttttgttttgttttctttctaatcgaggtgtgaaaaagttctaggttcagttgaagttctgatgaagaaacacaattgagattttttcagtgataaaatctgcatatttgtatttcaacaatgtagctaaaacttgatgtaaattcctcctttttttccttttttggcttaatgaatatcatttattcagtatgaaatctttatactatatgttccacgtgttaagaataaatgtacattaaatcttggtaagacttt

SEQ ID NO: 43 - DNA, 8586 bp, Homo sapiens
cagaaagcggagagtcacagcggggccaggccctggggagcggagcctccaccgcccccctcattcccaggcaagggcttggggggaatgagccgggagagccgggtcccgagcctacagagccgggagcagctgagccgccggcgcctcggccgccgccgccgcctcctcctcctccgccgccgccagcccggagcctgagccggcggggcgggggggagaggagcgagcgcagcgcagcagcggagccccgcgaggcccgcccgggcgggtggggagggcagcccgggggactgggccccggggcggggtgggagggggggagaagacgaagacagggccgggtctctccgcggacgagacagcggggatcatggccgcgcaggtcgcccccgccgccgccagcagcctgggcaacccgccgccgccgccgccctcggagctgaagaaagccgagcagcagcagcgggaggaggcggggggcgaggcggcggcggcggcagcggccgagcgcggggaaatgaaggcagccgccgggcaggaaagcgagggccccgccgtggggccgccgcagccgctgggaaaggagctgcaggacggggccgagagcaatgggggtggcggcggcggcggagccggcagcggcggcgggcccggcgcggagccggacctgaagaactcgaacgggaacgcgggccctaggcccgccctgaacaataacctcacggagccgcccggcggcggcggtggcggcagcagcgatggggtgggggcgcctcctcactcagccgcggccgccttgccgcccccagcctacggcttcgggcaaccctacggccggagcccgtctgccgtcgccgccgccgcggccgccgtcttccaccaacaacatggcggacaacaaagccctggcctggcagcgctgcagagcggcggcggcgggggcctggagccctacgcggggccccagcagaactctcacgaccacggcttccccaaccaccagtacaactcctactaccccaaccgcagcgcctaccccccgcccgccccggcctacgcgctgagctccccgagaggtggcactccgggctccggcgcggcggcggctgccggctccaagccgcctccctcctccagcgcctccgcctcctcgtcgtcttcgtccttcgctcagcagcgcttcggggccatggggggaggcggcccctccgcggccggcgggggaactccccagcccaccgccacccccaccctcaaccaactgctcacgtcgcccagctcggcccggggctaccagggctaccccgggggcgactacagtggcgggccccaggacgggggcgccggcaagggcccggcggacatggcctcgcagtgttggggggctgcggcggcggcagctgcggcggcggccgcctcgggaggggcccaacaaaggagccaccacgcgcccatgagccccgggagcagcggcggcggggggcagccgctcgcccggacccctcagccatccagtccaatggatcagatgggcaagatgagacctcagccatatggcgggactaacccatactcgcagcaacagggacctccgtcaggaccgcagcaaggacatgggtacccagggcagccatacgggtcccagaccccgcagcggtacccgatgaccatgcagggccgggcgcagagtgccatgggcggcctctcttatacacagcagattcctccttatggacaacaaggccccagcgggtatggtcaacagggccagactccatattacaaccagcaaagtcctcaccctcagcagcagcagccaccctactcccagcaaccaccgtcccagacccctcatgcccaaccttcgtatcagcagcagccacagtctcaaccaccacagctccagtcctctcagcctccatactcccagcagccatcccagcctccacatcagcagtccccggctccatacccctcccagcagtcgacgacacagcagcacccccagagccagcccccctactcacagccacaggctcagtctccttaccagcagcagcaacctcagcagccagcaccctcgacgctctcccagcaggctgcgtatcctcagccccagtctcagcagtcccagcaaactgcctattcccagcagcgcttccctccaccgcaggagctatctcaagattcatttgggtctcaggcatcctcagccccctcaatgacctccagtaagggagggcaagaagatatgaacctgagccttcagtcaagaccctccagcttgcctgatctatctggttcaatagatgacctccccatggggacagaaggagctctgagtcctggagtgagcacatcagggatttccagcagccaaggagagcagagtaatccagctcagtctcctttctctcctcatacctcccctcacctgcctggcatccgaggcccttccccgtcccctgttggctctcccgccagtgttgctcagtctcgctcaggaccactctcgcctgctgcagtgccaggcaaccagatgccacctcggccacccagtggccagtcggacagcatcatgcatccttccatgaaccaatcaagcattgcccaagatcgaggttatatgcagaggaacccccagatgccccagtacagttccccccagcccggctcagccttatctccgcgtcagccttccggaggacagatacacacaggcatgggctcctaccagcagaactccatggggagctatggtccccaggggggtcagtatggcccacaaggtggctaccccaggcagccaaactataatgccttgcccaatgccaactaccccagtgcaggcatggctggaggcataaaccccatgggtgccggaggtcaaatgcatggacagcctggcatcccaccttatggcacactccctccagggaggatgagtcacgcctccatgggcaaccggccttatggccctaacatggccaatatgccacctcaggttgggtcagggatgtgtcccccaccagggggcatgaaccggaaaacccaagaaactgctgtcgccatgcatgttgctgccaactctatccaaaacaggccgccaggctaccccaatatgaatcaagggggcatgatgggaactggacctccttatggacaagggattaatagtatggctggcatgatcaaccctcagggacccccatattccatgggtggaaccatggccaacaattctgcagggatggcagccagcccagagatgatgggccttggggatgtaaagttaactccagccaccaaaatgaacaacaaggcagatgggacacccaagacagaatccaaatccaagaaatccagttcttctactacaaccaatgagaagatcaccaagttgtatgagctgggtggtgagcctgagaggaagatgtgggtggaccgttatctggccttcactgaggagaaggccatgggcatgacaaatctgcctgctgtgggtaggaaacctctggacctctatcgcctctatgtgtctgtgaaggagattggtggattgactcaggtcaacaagaacaaaaaatggcgggaacttgcaaccaacctcaatgtgggcacatcaagcagtgctgccagctccttgaaaaagcagtatatccagtgtctctatgcctttgaatgcaagattgaacggggagaagaccctcccccagacatctttgcagctgctgattccaagaagtcccagcccaagatccagcctccctctcctgcgggatcaggatctatgcaggggccccagactccccagtcaaccagcagttccatggcagaaggaggagacttaaagccaccaactccagcatccacaccacacagtcagatccccccattgccaggcatgagcaggagcaattcagttgggatccaggatgcctttaatgatggaagtgactccacattccagaagcggaattccatgactccaaaccctgggtatcagcccagtatgaatacctctgacatgatggggcgcatgtcctatgagccaaataaggatccttatggcagcatgaggaaagctccagggagtgatcccttcatgtcctcagggcagggccccaacggcgggatgggtgacccctacagtcgtgctgccggccctgggctaggaaatgtggcgatgggaccacgacagcactatccctatggaggtccttatgacagagtgaggacggagcctggaatagggcctgagggaaacatgagcactggggccccacagccgaatctcatgccttccaacccagactcggggatgtattctcctagccgctaccccccgcagcagcagcagcagcagcagcaacgacatgattcctatggcaatcagttctccacccaaggcaccccttctggcagccccttccccagccagcagactacaatgtatcaacagcaacagcagaattacaagcggccaatggatggcacatatggccctcctgccaagcggcacgaaggggagatgtacagcgtgccatacagcactgggcaggggcagcctcagcagcagcagttgcccccagcccagccccagcctgccagccagcaacaagctgcccagccttcccctcagcaagatgtatacaaccagtatggcaatgcctatcctgccactgccacagctgctactgagcgccgaccagcaggcggcccccagaaccaatttccattccagtttggccgagaccgtgtctctgcaccccctggcaccaatgcccagcaaaacatgccaccacaaatgatgggcggccccatacaggcatcagctgaggttgctcagcaaggcaccatgtggcaggggcgtaatgacatgacctataattatgccaacaggcagagcacgggctctgccccccagggccccgcctatcatggcgtgaaccgaacagatgaaatgctgcacacagatcagagggccaaccacgaaggctcgtggccttcccatggcacacgccagcccccatatggtccctctgcccctgtgccccccatgacaaggccccctccatctaactaccagcccccaccaagcatgcagaatcacattcctcaggtatccagccctgctcccctgccccggccaatggagaaccgcacctctcctagcaagtctccattcctgcactctgggatgaaaatgcagaaggcaggtcccccagtacctgcctcgcacatagcacctgcccctgtgcagccccccatgattcggcgggatatcaccttcccacctggctctgttgaagccacacagcctgtgttgaagcagaggaggcggctcacaatgaaagacattggaaccccggaggcatggcgggtaatgatgtccctcaagtctggtctcctggcagagagcacatgggcattagataccatcaacatcctgctgtatgatgacaacagcatcatgaccttcaacctcagtcagctcccagggttgctagagctccttgtagaatatttccgacgatgcctgattgagatctttggcattttaaaggagtatgaggtgggtgacccaggacagagaacgctactggatcctgggaggttcagcaaggtgtctagtccagctcccatggagggtggggaagaagaagaagaacttctaggtcctaaactagaagaggaagaagaagaggaagtagttgaaaatgatgaggagatagccttttcaggcaaggacaagccagcttcagagaatagtgaggagaagctgatcagtaagtttgacaagcttccagtaaagatcgtacagaagaatgatccatttgtggtggactgctcagataagcttgggcgtgtgcaggagtttgacagtggcctgctgcactggcggattggtgggggggacaccactgagcatatccagacccacttcgagagcaagacagagctgctgccttcccggcctcacgcaccctgcccaccagcccctcggaagcatgtgacaacagcagagggtacaccagggacaacagaccaggaggggcccccacctgatggacctccagaaaaacggatcacagccactatggatgacatgttgtctactcggtctagcaccttgaccgaggatggagctaagagttcagaggccatcaaggagagcagcaagtttccatttggcattagcccagcacagagccaccggaacatcaagatcctagaggacgaaccccacagtaaggatgagaccccactgtgtacccttctggactggcaggattctcttgccaagcgctgcgtctgtgtgtccaataccattcgaagcctgtcatttgtgccaggcaatgactttgagatgtccaaacacccagggctgctgctcatcctgggcaagctgatcctgctgcaccacaagcacccagaacggaagcaggcaccactaacttatgaaaaggaggaggaacaggaccaaggggtgagctgcaacaaagtggagtggtggtgggactgcttggagatgctccgggaaaacaccttggttacactcgccaacatctcggggcagttggacctatctccataccccgagagcatttgcctgcctgtcctggacggactcctacactgggcagtttgcccttcagctgaagcccaggaccccttttccaccctgggccccaatgccgtcctttccccgcagagactggtcttggaaaccctcagcaaactcagcatccaggacaacaatgtggacctgattctggccacacccccccttcagccgcctggagaagttgtatagcactatggtgcgcttcctcagtgaccgaaagaacccggtgtgccgggagatggctgtggtactgctggccaacctggctcagggggacagcctggcagctcgtgccattgcagtgcagaagggcagtatcggcaacctcctgggcttcctagaggacagccttgccgccacacagttccagcagagccaggccagcctcctccacatgcagaacccaccctttgagccaactagtgtggacatgatgcggcgggctgcccgcgcgctgcttgccttggccaaggtggacgagaaccactcagagtttactctgtacgaatcacggctgttggacatctcggtatcaccgttgatgaactcattggtttcacaagtcatttgtgatgtactgtttttgattggccagtcatgacagccgtgggacacctcccccccccgtgtgtgtgtgcgtgtgtggagaacttagaaactgactgttgccctttatttatgcaaaaccacctcagaatccagtttaccctgtgctgtccagcttctcccttgggaaaaagtctctcctgtttctctctcctccttccacctcccctccctccatcacctcacgcctttctgttccttgtcctcaccttactcccctcaggaccctaccccaccctctttgaaaagacaaagctctgcctacatagaagactttttttattttaaccaaagttactgttgtttacagtgagtttggggaaaaaaaataaaataaaaatggctttcccagtccttgcatcaacgggatgccacatttcataactgtttttaatggtaaaaaaaaaaaaaaaaaatacaaaaaaaaattctgaaggacaaaaaaggtgactgctgaactgtgtgtggtttattgttgtacattcacaatcttgcaggagccaagaagttcgcagttgtgaacagaccctgttcactggagaggcctgtgcagtagagtgtagaccctttcatgtactgtactgtacacctgatactgtaaacatactgtaataataatgtctcacatggaaacagaaaacgctgggtcagcagcaagctgtagtttttaaaaatgtttttagttaaacgttgaggagaaaaaaaaaaaaggcttttcccccaaagtatcatgtgtgaacctacaacaccctgacctctttctctcctccttgattgtatgaataaccctgagatcacctcttagaactggttttaacctttagctgcagcggctacgctgccacgtgtgtatatatatgacgttgtacattgcacatacccttggatccccacagtttggtcctcctcccagctacccctttatagtatgacgagttaacaagttggtgacctgcacaaagcgagacacagctatttaatctcttgccagatatcgcccctcttggtgcgatgctgtacaggtctctgtaaaaagtccttgctgtctcagcagccaatcaacttatagtttatttttttctgggtttttgttttgttttgttttctttctaatcgaggtgtgaaaaagttctaggttcagttgaagttctgatgaagaaacacaattgagattttttcagtgataaaatctgcatatttgtatttcaacaatgtagctaaaacttgatgtaaattcctcctttttttccttttttggcttaatgaatatcatttattcagtatgaaatctttatactatatgttccacgtgttaagaataaatgtacattaaatcttggtaagacttt

SEQ ID NO: 44 - DNA, 8585 bp, Homo sapiens
cagaaagcggagagtcacagcggggccaggccctggggagcggagcctccaccgcccccctcattcccaggcaagggcttggggggaatgagccgggagagccgggtcccgagcctacagagccgggagcagctgagccgccggcgcctcggccgccgccgccgcctcctcctcctccgccgccgccagcccggagcctgagccggcggggcgggggggagaggagcgagcgcagcgcagcagcggagccccgcgaggcccgcccgggcgggtggggagggcagcccgggggactgggccccggggcggggtgggagggggggagaagacgaagacagggccgggtctctccgcggacgagacagcggggatcatggccgcgcaggtcgcccccgccgccgccagcagcctgggcaacccgccgccgccgccgccctcggagctgaagaaagccgagcagcagcagcgggaggaggcggggggcgaggcggcggcggcggcagcggccgagcgcggggaaatgaaggcagccgccgggcaggaaagcgagggccccgccgtggggccgccgcagccgctgggaaaggagctgcaggacggggccgagagcaatgggggtggcggcggcggcggagccggcagcggcggcgggcccggcgcggagccggacctgaagaactcgaacgggaacgcgggccctaggcccgccctgaacaataacctcacggagccgcccggcggcggcggtggcggcagcagcgatggggtgggggcgcctcctcactcagccgcggccgccttgccgcccccagcctacggcttcgggcaaccctacggccggagcccgtctgccgtcgccgccgccgcggccgccgtcttccaccaacaacatggcggacaacaaagccctggcctggcagcgctgcagagcggcggcggcgggggcctggagccctacgcggggccccagcagaactctcacgaccacggcttccccaaccaccagtacaactcctactaccccaaccgcagcgcctaccccccgcccgccccggcctacgcgctgagctccccgagaggtggcactccgggctccggcgcggcggcggctgccggctccaagccgcctccctcctccagcgcctccgcctcctcgtcgtcttcgtccttcgctcagcagcgcttcggggccatggggggaggcggcccctccgcggccggcgggggaactccccagcccaccgccacccccaccctcaaccaactgctcacgtcgcccagctcggcccggggctaccagggctaccccgggggcgactacagtggcgggccccaggacgggggcgccggcaagggcccggcggacatggcctcgcagtgttggggggctgcggcggcggcagctgcggcggcggccgcctcgggaggggcccaacaaaggagccaccacgcgcccatgagccccgggagcagcggcggcggggggcagccgctcgcccggacccctcagccatccagtccaatggatcagatgggcaagatgagacctcagccatatggcgggactaacccatactcgcagcaacagggacctccgtcaggaccgcagcaaggacatgggtacccagggcagccatacgggtcccagaccccgcagcggtacccgatgaccatgcagggccgggcgcagagtgccatgggcggcctctcttatacacagcagattcctccttatggacaacaaggccccagcgggtatggtcaacagggccagactccatattacaaccagcaaagtcctcaccctcagcagcagcagccaccctactcccagcaaccaccgtcccagacccctcatgcccaaccttcgtatcagcagcagccacagtctcaaccaccacagctccagtcctctcagcctccatactcccagcagccatcccagcctccacatcagcagtccccggctccatacccctcccagcagtcgacgacacagcagcacccccagagccagcccccctactcacagccacaggctcagtctccttaccagcagcagcaacctcagcagccagcaccctcgacgctctcccagcaggctgcgtatcctcagccccagtctcagcagtcccagcaaactgcctattcccagcagcgcttccctccaccgcaggagctatctcaagattcatttgggtctcaggcatcctcagccccctcaatgacctccagtaagggagggcaagaagatatgaacctgagccttcagtcaagaccctccagcttgcctgatctatctggttcaatagatgacctccccatggggacagaaggagctctgagtcctggagtgagcacatcagggatttccagcagccaaggagagcagagtaatccagctcagtctcctttctctcctcatacctcccctcacctgcctggcatccgaggcccttccccgtcccctgttggctctcccgccagtgttgctcagtctcgctcaggaccactctcgcctgctgcagtgccaggcaaccagatgccacctcggccacccagtggccagtcggacagcatcatgcatccttccatgaaccaatcaagcattgcccaagatcgaggttatatgcagaggaacccccagatgccccagtacagttccccccagcccggctcagccttatctccgcgtcagccttccggaggacagatacacacaggcatgggctcctaccagcagaactccatggggagctatggtccccaggggggtcagtatggcccacaaggtggctaccccaggcagccaaactataatgccttgcccaatgccaactaccccagtgcaggcatggctggaggcataaaccccatgggtgccggaggtcaaatgcatggacagcctggcatcccaccttatggcacactccctccagggaggatgagtcacgcctccatgggcaaccggccttatggccctaacatggccaatatgccacctcaggttgggtcagggatgtgtcccccaccagggggcatgaaccggaaaacccaagaaactgctgtcgccatgcatgttgctgccaactctatccaaaacaggccgccaggctaccccaatatgaatcaagggggcatgatgggaactggacctccttatggacaagggattaatagtatggctggcatgatcaaccctcagggacccccatattccatgggtggaaccatggccaacaattctgcagggatggcagccagcccagagatgatgggccttggggatgtaaagttaactccagccaccaaaatgaacaacaaggcagatgggacacccaagacagaatccaaatccaagaaatccagttcttctactacaaccaatgagaagatcaccaagttgtatgagctgggtggtgagcctgagaggaagatgtgggtggaccgttatctggccttcactgaggagaaggccatgggcatgacaaatctgcctgctgtgggtaggaaacctctggacctctatcgcctctatgtgtctgtgaaggagattggtggattgactcaggtcaacaagaacaaaaaatggcgggaacttgcaaccaacctcaatgtgggcacatcaagcagtgctgccagctccttgaaaaagcagtatatccagtgtctctatgcctttgaatgcaagattgaacggggagaagaccctcccccagacatctttgcagctgctgattccaagaagtcccagcccaagatccagcctccctctcctgcgggatcaggatctatgcaggggccccagactccccagtcaaccagcagttccatggcagaaggaggagacttaaagccaccaactccagcatccacaccacacagtcagatccccccattgccaggcatgagcaggagcaattcagttgggatccaggatgcctttaatgatggaagtgactccacattccagaagcggaattccatgactccaaaccctgggtatcagcccagtatgaatacctctgacatgatggggcgcatgtcctatgagccaaataaggatccttatggcagcatgaggaaagctccagggagtgatcccttcatgtcctcagggcagggccccaacggcgggatgggtgacccctacagtcgtgctgccggccctgggctaggaaatgtggcgatgggaccacgacagcactatccctatggaggtccttatgacagagtgaggacggagcctggaatagggcctgagggaaacatgagcactggggccccacagccgaatctcatgccttccaacccagactcggggatgtattctcctagccgctaccccccgcagcagcagcagcagcagcagcaacgacatgattcctatggcaatcagttctccacccaaggcaccccttctggcagccccttccccagccagcagactacaatgtatcaacagcaacagcagaattacaagcggccaatggatggcacatatggccctcctgccaagcggcacgaaggggagatgtacagcgtgccatacagcactgggcaggggcagcctcagcagcagcagttgcccccagcccagccccagcctgccagccagcaacaagctgcccagccttcccctcagcaagatgtatacaaccagtatggcaatgcctatcctgccactgccacagctgctactgagcgccgaccagcaggcggcccccagaaccaatttccattccagtttggccgagaccgtgtctctgcaccccctggcaccaatgcccagcaaaacatgccaccacaaatgatgggcggccccatacaggcatcacctgaggttgctcagcaaggcaccatgtggcaggggcgtaatgacatgacctataattatgccaacaggcagagcacgggctctgccccccagggccccgcctatcatggcgtgaaccgaacagatgaaatgctgcacacagatcagagggccaaccacgaaggctcgtggccttcccatggcacacgccagcccccatatggtccctctgcccctgtgccccccatgacaaggccccctccatctaactaccagcccccaccaagcatgcagaatcacattcctcaggtatccagccctgctcccctgccccggccaatggagaaccgcacctctcctagcaagtctccattcctgcactctgggatgaaaatgcagaaggcaggtcccccagtacctgcctcgcacatagcacctgcccctgtgcagccccccatgattcggcgggatatcaccttcccacctggctctgttgaagccacacagcctgtgttgaagcagaggaggcggctcacaatgaaagacattggaaccccggaggcatggcgggtaatgatgtccctcaagtctggtctcctggcagagagcacatgggcattagataccatcaacatcctgctgtatgatgacaacagcatcatgaccttcaacctcagtcagctcccagggttgctagagctccttgtagaatatttccgacgatgcctgattgagatctttggcattttaaaggagtatgaggtgggtgacccaggacagagaacgctactggatcctgggaggttcagcaaggtgtctagtccagctcccatggagggtggggaagaagaagaagaacttctaggtcctaaactagaagaggaagaagaagaggaagtagttgaaaatgatgaggagatagccttttcaggcaaggacaagccagcttcagagaatagtgaggagaagctgatcagtaagtttgacaagcttccagtaaagatcgtacagaagaatgatccatttgtggtggactgctcagataagcttgggcgtgtgcaggagtttgacagtggcctgctgcactggcggattggtgggggggacaccactgagcatatccagacccacttcgagagcaagacagagctgctgccttcccggcctcacgcaccctgcccaccagcccctcggaagcatgtgacaacagcagagggtacaccagggacaacagaccaggaggggcccccacctgatggacctccagaaaaacggatcacagccactatggatgacatgttgtctactcggtctagcaccttgaccgaggatggagctaagagttcagaggccatcaaggagagcagcaagtttccatttggcattagcccagcacagagccaccggaacatcaagatcctagaggacgaaccccacagtaaggatgagaccccactgtgtacccttctggactggcaggattctcttgccaagcgctgcgtctgtgtgtccaataccattcgaagcctgtcatttgtgccaggcaatgactttgagatgtccaaacacccagggctgctgctcatcctgggcaagctgatcctgctgcaccacaagcacccagaacggaagcaggcaccactaacttatgaaaaggaggaggaacaggaccaaggggtgagctgcaacaaagtggagtggtggtgggactgcttggagatgctccgggaaaacaccttggttacactcgccaacatctcggggcagttggacctatctccataccccgagagcatttgcctgcctgtcctggacggactcctacactgggcagtttgcccttcagctgaagcccaggaccccttttccaccctgggccccaatgccgtcctttccccgcagagactggtcttggaaaccctcagcaaactcagcatccaggacaacaatgtggacctgattctggccacaccccccttcagccgcctggagaagttgtatagcactatggtgcgcttcctcagtgaccgaaagaacccggtgtgccgggagatggctgtggtactgctggccaacctggctcagggggacagcctggcagctcgtgccattgcagtgcagaagggcagtatcggcaacctcctgggcttcctagaggacagccttgccgccacacagttccagcagagccaggccagcctcctccacatgcagaacccaccctttgagccaactagtgtggacatgatgcggcgggctgcccgcgcgctgcttgccttggccaaggtggacgagaaccactcagagtttactctgtacgaatcacggctgttggacatctcggtatcaccgttgatgaactcattggtttcacaagtcatttgtgatgtactgtttttgattggccagtcatgacagccgtgggacacctcccccccccgtgtgtgtgtgcgtgtgtggagaacttagaaactgactgttgccctttatttatgcaaaaccacctcagaatccagtttaccctgtgctgtccagcttctcccttgggaaaaagtctctcctgtttctctctcctccttccacctcccctccctccatcacctcacgcctttctgttccttgtcctcaccttactcccctcaggaccctaccccaccctctttgaaaagacaaagctctgcctacatagaagactttttttattttaaccaaagttactgttgtttacagtgagtttggggaaaaaaaataaaataaaaatggctttcccagtccttgcatcaacgggatgccacatttcataactgtttttaatggtaaaaaaaaaaaaaaaaaatacaaaaaaaaattctgaaggacaaaaaaggtgactgctgaactgtgtgtggtttattgttgtacattcacaatcttgcaggagccaagaagttcgcagttgtgaacagaccctgttcactggagaggcctgtgcagtagagtgtagaccctttcatgtactgtactgtacacctgatactgtaaacatactgtaataataatgtctcacatggaaacagaaaacgctgggtcagcagcaagctgtagtttttaaaaatgtttttagttaaacgttgaggagaaaaaaaaaaaaggcttttcccccaaagtatcatgtgtgaacctacaacaccctgacctctttctctcctccttgattgtatgaataaccctgagatcacctcttagaactggttttaacctttagctgcagcggctacgctgccacgtgtgtatatatatgacgttgtacattgcacatacccttggatccccacagtttggtcctcctcccagctacccctttatagtatgacgagttaacaagttggtgacctgcacaaagcgagacacagctatttaatctcttgccagatatcgcccctcttggtgcgatgctgtacaggtctctgtaaaaagtccttgctgtctcagcagccaatcaacttatagtttatttttttctgggtttttgttttgttttgttttctttctaatcgaggtgtgaaaaagttctaggttcagttgaagttctgatgaagaaacacaattgagattttttcagtgataaaatctgcatatttgtatttcaacaatgtagctaaaacttgatgtaaattcctcctttttttccttttttggcttaatgaatatcatttattcagtatgaaatctttatactatatgttccacgtgttaagaataaatgtacattaaatcttggtaagacttt

SEQ ID NO: 45 - DNA, 8585 bp, Homo sapiens
cagaaagcggagagtcacagcggggccaggccctggggagcggagcctccaccgcccccctcattcccaggcaagggcttggggggaatgagccgggagagccgggtcccgagcctacagagccgggagcagctgagccgccggcgcctcggccgccgccgccgcctcctcctcctccgccgccgccagcccggagcctgagccggcggggcgggggggagaggagcgagcgcagcgcagcagcggagccccgcgaggcccgcccgggcgggtggggagggcagcccgggggactgggccccggggcggggtgggagggggggagaagacgaagacagggccgggtctctccgcggacgagacagcggggatcatggccgcgcaggtcgcccccgccgccgccagcagcctgggcaacccgccgccgccgccgccctcggagctgaagaaagccgagcagcagcagcgggaggaggcggggggcgaggcggcggcggcggcagcggccgagcgcggggaaatgaaggcagccgccgggcaggaaagcgagggccccgccgtggggccgccgcagccgctgggaaaggagctgcaggacggggccgagagcaatgggggtggcggcggcggcggagccggcagcggcggcgggcccggcgcggagccggacctgaagaactcgaacgggaacgcgggccctaggcccgccctgaacaataacctcacggagccgcccggcggcggcggtggcggcagcagcgatggggtgggggcgcctcctcactcagccgcggccgccttgccgcccccagcctacggcttcgggcaaccctacggccggagcccgtctgccgtcgccgccgccgcggccgccgtcttccaccaacaacatggcggacaacaaagccctggcctggcagcgctgcagagcggcggcggcgggggcctggagccctacgcggggccccagcagaactctcacgaccacggcttccccaaccaccagtacaactcctactaccccaaccgcagcgcctaccccccgcccgccccggcctacgcgctgagctccccgagaggtggcactccgggctccggcgcggcggcggctgccggctccaagccgcctccctcctccagcgcctccgcctcctcgtcgtcttcgtccttcgctcagcagcgcttcggggccatggggggaggcggcccctccgcggccggcgggggaactccccagcccaccgccacccccaccctcaaccaactgctcacgtcgcccagctcggcccggggctaccagggctaccccgggggcgactacagtggcgggccccaggacgggggcgccggcaagggcccggcggacatggcctcgcagtgttggggggctgcggcggcggcagctgcggcggcggccgcctcgggaggggcccaacaaaggagccaccacgcgcccatgagccccgggagcagcggcggcggggggcagccgctcgcccggacccctcagccatccagtccaatggatcagatgggcaagatgagacctcagccatatggcgggactaacccatactcgcagcaacagggacctccgtcaggaccgcagcaaggacatgggtacccagggcagccatacgggtcccagaccccgcagcggtacccgatgaccatgcagggccgggcgcagagtgccatgggcggcctctcttatacacagcagattcctccttatggacaacaaggccccagcgggtatggtcaacagggccagactccatattacaaccagcaaagtcctcaccctcagcagcagcagccaccctactcccagcaaccaccgtcccagacccctcatgcccaaccttcgtatcagcagcagccacagtctcaaccaccacagctccagtcctctcagcctccatactcccagcagccatcccagcctccacatcagcagtccccggctccatacccctcccagcagtcgacgacacagcagcacccccagagccagcccccctactcacagccacaggctcagtctccttaccagcagcagcaacctcagcagccagcaccctcgacgctctcccagcaggctgcgtatcctcagccccagtctcagcagtcccagcaaactgcctattcccagcagcgcttccctccaccgcaggagctatctcaagattcatttgggtctcaggcatcctcagccccctcaatgacctccagtaagggagggcaagaagatatgaacctgagccttcagtcaagaccctccagcttgcctgatctatctggttcaatagatgacctccccatggggacagaaggagctctgagtcctggagtgagcacatcagggatttccagcagccaaggagagcagagtaatccagctcagtctcctttctctcctcatacctcccctcacctgcctggcatccgaggcccttccccgtcccctgttggctctcccgccagtgttgctcagtctcgctcaggaccactctcgcctgctgcagtgccaggcaaccagatgccacctcggccacccagtggccagtcggacagcatcatgcatccttccatgaaccaatcaagcattgcccaagatcgaggttatatgcagaggaacccccagatgccccagtacagttccccccagcccggctcagccttatctccgcgtcagccttccggaggacagatacacacaggcatgggctcctaccagcagaactccatggggagctatggtccccaggggggtcagtatggcccacaaggtggctaccccaggcagccaaactataatgccttgcccaatgccaactaccccagtgcaggcatggctggaggcataaaccccatgggtgccggaggtcaaatgcatggacagcctggcatcccaccttatggcacactccctccagggaggatgagtcacgcctccatgggcaaccggccttatggccctaacatggccaatatgccacctcaggttgggtcagggatgtgtcccccaccagggggcatgaaccggaaaacccaagaaactgctgtcgccatgcatgttgctgccaactctatccaaaacaggccgccaggctaccccaatatgaatcaagggggcatgatgggaactggacctccttatggacaagggattaatagtatggctggcatgatcaaccctcagggacccccatattccatgggtggaaccatggccaacaattctgcagggatggcagccagcccagagatgatgggccttggggatgtaaagttaactccagccaccaaaatgaacaacaaggcagatgggacacccaagacagaatccaaatccaagaaatccagttcttctactacaaccaatgagaagatcaccaagttgtatgagctgggtggtgagcctgagaggaagatgtgggtggaccgttatctggccttcactgaggagaaggccatgggcatgacaaatctgcctgctgtgggtaggaaacctctggacctctatcgcctctatgtgtctgtgaaggagattggtggattgactcaggtcaacaagaacaaaaaatggcgggaacttgcaaccaacctcaatgtgggcacatcaagcagtgctgccagctccttgaaaaagcagtatatccagtgtctctatgcctttgaatgcaagattgaacggggagaagaccctcccccagacatctttgcagctgctgattccaagaagtcccagcccaagatccagcctccctctcctgcgggatcaggatctatgcaggggccccagactccccagtcaaccagcagttccatggcagaaggaggagacttaaagccaccaactccagcatccacaccacacagtcagatccccccattgccaggcatgagcaggagcaattcagttgggatccaggatgcctttaatgatggaagtgactccacattccagaagcggaattccatgactccaaaccctgggtatcagcccagtatgaatacctctgacatgatggggcgcatgtcctatgagccaaataaggatccttatggcagcatgaggaaagctccagggagtgatcccttcatgtcctcagggcagggccccaacggcgggatgggtgacccctacagtcgtgctgccggccctgggctaggaaatgtggcgatgggaccacgacagcactatccctatggaggtccttatgacagagtgaggacggagcctggaatagggcctgagggaaacatgagcactggggccccacagccgaatctcatgccttccaacccagactcggggatgtattctcctagccgctaccccccgcagcagcagcagcagcagcagcaacgacatgattcctatggcaatcagttctccacccaaggcaccccttctggcagccccttccccagccagcagactacaatgtatcaacagcaacagcagaattacaagcggccaatggatggcacatatggccctcctgccaagcggcacgaaggggagatgtacagcgtgccatacagcactgggcaggggcagcctcagcagcagcagttgcccccagcccagccccagcctgccagccagcaacaagctgcccagccttcccctcagcaagatgtatacaaccagtatggcaatgcctatcctgccactgccacagctgctactgagcgccgaccagcaggcggcccccagaaccaatttccattccagtttggccgagaccgtgtctctgcaccccctggcaccaatgcccagcaaaacatgccaccacaaatgatgggcggccccatacaggcatcagctgaggttgctcagcaaggcaccatgtggcaggggcgtaatgacatgacctataattatgccaacaggcagagcacgggctctgccccccagggccccgcctatcatggcgtgaaccgaacagatgaaatgctgcacacagatcagagggccaaccacgaaggctcgtggccttcccatggcacacgccagcccccatatggtccctctgcccctgtgccccccatgacaaggccccctccatctaactaccagcccccaccaagcatgcagaatcacattcctcaggtatccagccctgctcccctgccctggccaatggagaaccgcacctctcctagcaagtctccattcctgcactctgggatgaaaatgcagaaggcaggtcccccagtacctgcctcgcacatagcacctgcccctgtgcagccccccatgattcggcgggatatcaccttcccacctggctctgttgaagccacacagcctgtgttgaagcagaggaggcggctcacaatgaaagacattggaaccccggaggcatggcgggtaatgatgtccctcaagtctggtctcctggcagagagcacatgggcattagataccatcaacatcctgctgtatgatgacaacagcatcatgaccttcaacctcagtcagctcccagggttgctagagctccttgtagaatatttccgacgatgcctgattgagatctttggcattttaaaggagtatgaggtgggtgacccaggacagagaacgctactggatcctgggaggttcagcaaggtgtctagtccagctcccatggagggtggggaagaagaagaagaacttctaggtcctaaactagaagaggaagaagaagaggaagtagttgaaaatgatgaggagatagccttttcaggcaaggacaagccagcttcagagaatagtgaggagaagctgatcagtaagtttgacaagcttccagtaaagatcgtacagaagaatgatccatttgtggtggactgctcagataagcttgggcgtgtgcaggagtttgacagtggcctgctgcactggcggattggtgggggggacaccactgagcatatccagacccacttcgagagcaagacagagctgctgccttcccggcctcacgcaccctgcccaccagcccctcggaagcatgtgacaacagcagagggtacaccagggacaacagaccaggaggggcccccacctgatggacctccagaaaaacggatcacagccactatggatgacatgttgtctactcggtctagcaccttgaccgaggatggagctaagagttcagaggccatcaaggagagcagcaagtttccatttggcattagcccagcacagagccaccggaacatcaagatcctagaggacgaaccccacagtaaggatgagaccccactgtgtacccttctggactggcaggattctcttgccaagcgctgcgtctgtgtgtccaataccattcgaagcctgtcatttgtgccaggcaatgactttgagatgtccaaacacccagggctgctgctcatcctgggcaagctgatcctgctgcaccacaagcacccagaacggaagcaggcaccactaacttatgaaaaggaggaggaacaggaccaaggggtgagctgcaacaaagtggagtggtggtgggactgcttggagatgctccgggaaaacaccttggttacactcgccaacatctcggggcagttggacctatctccataccccgagagcatttgcctgcctgtcctggacggactcctacactgggcagtttgcccttcagctgaagcccaggaccccttttccaccctgggccccaatgccgtcctttccccgcagagactggtcttggaaaccctcagcaaactcagcatccaggacaacaatgtggacctgattctggccacaccccccttcagccgcctggagaagttgtatagcactatggtgcgcttcctcagtgaccgaaagaacccggtgtgccgggagatggctgtggtactgctggccaacctggctcagggggacagcctggcagctcgtgccattgcagtgcagaagggcagtatcggcaacctcctgggcttcctagaggacagccttgccgccacacagttccagcagagccaggccagcctcctccacatgcagaacccaccctttgagccaactagtgtggacatgatgcggcgggctgcccgcgcgctgcttgccttggccaaggtggacgagaaccactcagagtttactctgtacgaatcacggctgttggacatctcggtatcaccgttgatgaactcattggtttcacaagtcatttgtgatgtactgtttttgattggccagtcatgacagccgtgggacacctcccccccccgtgtgtgtgtgcgtgtgtggagaacttagaaactgactgttgccctttatttatgcaaaaccacctcagaatccagtttaccctgtgctgtccagcttctcccttgggaaaaagtctctcctgtttctctctcctccttccacctcccctccctccatcacctcacgcctttctgttccttgtcctcaccttactcccctcaggaccctaccccaccctctttgaaaagacaaagctctgcctacatagaagactttttttattttaaccaaagttactgttgtttacagtgagtttggggaaaaaaaataaaataaaaatggctttcccagtccttgcatcaacgggatgccacatttcataactgtttttaatggtaaaaaaaaaaaaaaaaaatacaaaaaaaaattctgaaggacaaaaaaggtgactgctgaactgtgtgtggtttattgttgtacattcacaatcttgcaggagccaagaagttcgcagttgtgaacagaccctgttcactggagaggcctgtgcagtagagtgtagaccctttcatgtactgtactgtacacctgatactgtaaacatactgtaataataatgtctcacatggaaacagaaaacgctgggtcagcagcaagctgtagtttttaaaaatgtttttagttaaacgttgaggagaaaaaaaaaaaaggcttttcccccaaagtatcatgtgtgaacctacaacaccctgacctctttctctcctccttgattgtatgaataaccctgagatcacctcttagaactggttttaacctttagctgcagcggctacgctgccacgtgtgtatatatatgacgttgtacattgcacatacccttggatccccacagtttggtcctcctcccagctacccctttatagtatgacgagttaacaagttggtgacctgcacaaagcgagacacagctatttaatctcttgccagatatcgcccctcttggtgcgatgctgtacaggtctctgtaaaaagtccttgctgtctcagcagccaatcaacttatagtttatttttttctgggtttttgttttgttttgttttctttctaatcgaggtgtgaaaaagttctaggttcagttgaagttctgatgaagaaacacaattgagattttttcagtgataaaatctgcatatttgtatttcaacaatgtagctaaaacttgatgtaaattcctcctttttttccttttttggcttaatgaatatcatttattcagtatgaaatctttatactatatgttccacgtgttaagaataaatgtacattaaatcttggtaagacttt

SEQ ID NO: 46 - DNA, 8586 bp, Homo sapiens
cagaaagcggagagtcacagcggggccaggccctggggagcggagcctccaccgcccccctcattcccaggcaagggcttggggggaatgagccgggagagccgggtcccgagcctacagagccgggagcagctgagccgccggcgcctcggccgccgccgccgcctcctcctcctccgccgccgccagcccggagcctgagccggcggggcgggggggagaggagcgagcgcagcgcagcagcggagccccgcgaggcccgcccgggcgggtggggagggcagcccgggggactgggccccggggcggggtgggagggggggagaagacgaagacagggccgggtctctccgcggacgagacagcggggatcatggccgcgcaggtcgcccccgccgccgccagcagcctgggcaacccgccgccgccgccgccctcggagctgaagaaagccgagcagcagcagcgggaggaggcggggggcgaggcggcggcggcggcagcggccgagcgcggggaaatgaaggcagccgccgggcaggaaagcgagggccccgccgtggggccgccgcagccgctgggaaaggagctgcaggacggggccgagagcaatgggggtggcggcggcggcggagccggcagcggcggcgggcccggcgcggagccggacctgaagaactcgaacgggaacgcgggccctaggcccgccctgaacaataacctcacggagccgcccggcggcggcggtggcggcagcagcgatggggtgggggcgcctcctcactcagccgcggccgccttgccgcccccagcctacggcttcgggcaaccctacggccggagcccgtctgccgtcgccgccgccgcggccgccgtcttccaccaacaacatggcggacaacaaagccctggcctggcagcgctgcagagcggcggcggcgggggcctggagccctacgcggggccccagcagaactctcacgaccacggcttccccaaccaccagtacaactcctactaccccaaccgcagcgcctaccccccgcccgccccggcctacgcgctgagctccccgagaggtggcactccgggctccggcgcggcggcggctgccggctccaagccgcctccctcctccagcgcctccgcctcctcgtcgtcttcgtccttcgctcagcagcgcttcggggccatggggggaggcggcccctccgcggccggcgggggaactccccagcccaccgccacccccaccctcaaccaactgctcacgtcgcccagctcggcccggggctaccagggctaccccgggggcgactacagtggcgggccccaggacgggggcgccggcaagggcccggcggacatggcctcgcagtgttggggggctgcggcggcggcagctgcggcggcggccgcctcgggaggggcccaacaaaggagccaccacgcgcccatgagccccgggagcagcggcggcggggggcagccgctcgcccggacccctcagccatccagtccaatggatcagatgggcaagatgagacctcagccatatggcgggactaacccatactcgcagcaacagggacctccgtcaggaccgcagcaaggacatgggtacccagggcagccatacgggtcccagaccccgcagcggtacccgatgaccatgcagggccgggcgcagagtgccatgggcggcctctcttatacacagcagattcctccttatggacaacaaggccccagcgggtatggtcaacagggccagactccatattacaaccagcaaagtcctcaccctcagcagcagcagccaccctactcccagcaaccaccgtcccagacccctcatgcccaaccttcgtatcagcagcagccacagtctcaaccaccacagctccagtcctctcagcctccatactcccagcagccatcccagcctccacatcagcagtccccggctccatacccctcccagcagtcgacgacacagcagcacccccagagccagcccccctactcacagccacaggctcagtctccttaccagcagcagcaacctcagcagccagcaccctcgacgctctcccagcaggctgcgtatcctcagccccagtctcagcagtcccagcaaactgcctattcccagcagcgcttccctccaccgcaggagctatctcaagattcatttgggtctcaggcatcctcagccccctcaatgacctccagtaagggagggcaagaagatatgaacctgagccttcagtcaagaccctccagcttgcctgatctatctggttcaatagatgacctccccatggggacagaaggagctctgagtcctggagtgagcacatcagggatttccagcagccaaggagagcagagtaatccagctcagtctcctttctctcctcatacctcccctcacctgcctggcatccgaggcccttccccgtcccctgttggctctcccgccagtgttgctcagtctcgctcaggaccactctcgcctgctgcagtgccaggcaaccagatgccacctcggccacccagtggccagtcggacagcatcatgcatccttccatgaaccaatcaagcattgcccaagatcgaggttatatgcagaggaacccccagatgccccagtacagttccccccagcccggctcagccttatctccgcgtcagccttccggaggacagatacacacaggcatgggctcctaccagcagaactccatggggagctatggtccccaggggggtcagtatggcccacaaggtggctaccccaggcagccaaactataatgccttgcccaatgccaactaccccagtgcaggcatggctggaggcataaaccccatgggtgccggaggtcaaatgcatggacagcctggcatcccaccttatggcacactccctccagggaggatgagtcacgcctccatgggcaaccggccttatggccctaacatggccaatatgccacctcaggttgggtcagggatgtgtcccccaccagggggcatgaaccggaaaacccaagaaactgctgtcgccatgcatgttgctgccaactctatccaaaacaggccgccaggctaccccaatatgaatcaagggggcatgatgggaactggacctccttatggacaagggattaatagtatggctggcatgatcaaccctcagggacccccatattccatgggtggaaccatggccaacaattctgcagggatggcagccagcccagagatgatgggccttggggatgtaaagttaactccagccaccaaaatgaacaacaaggcagatgggacacccaagacagaatccaaatccaagaaatccagttcttctactacaaccaatgagaagatcaccaagttgtatgagctgggtggtgagcctgagaggaagatgtgggtggaccgttatctggccttcactgaggagaaggccatgggcatgacaaatctgcctgctgtgggtaggaaacctctggacctctatcgcctctatgtgtctgtgaaggagattggtggattgactcaggtcaacaagaacaaaaaatggcgggaacttgcaaccaacctcaatgtgggcacatcaagcagtgctgccagctccttgaaaaagcagtatatccagtgtctctatgcctttgaatgcaagattgaacggggagaagaccctcccccagacatctttgcagctgctgattccaagaagtcccagcccaagatccagcctccctctcctgcgggatcaggatctatgcaggggccccagactccccagtcaaccagcagttccatggcagaaggaggagacttaaagccaccaactccagcatccacaccacacagtcagatccccccattgccaggcatgagcaggagcaattcagttgggatccaggatgcctttaatgatggaagtgactccacattccagaagcggaattccatgactccaaaccctgggtatcagcccagtatgaatacctctgacatgatggggcgcatgtcctatgagccaaataaggatccttatggcagcatgaggaaagctccagggagtgatcccttcatgtcctcagggcagggccccaacggcgggatgggtgacccctacagtcgtgctgccggccctgggctaggaaatgtggcgatgggaccacgacagcactatccctatggaggtccttatgacagagtgaggacggagcctggaatagggcctgagggaaacatgagcactggggccccacagccgaatctcatgccttccaacccagactcggggatgtattctcctagccgctaccccccgcagcagcagcagcagcagcagcaacgacatgattcctatggcaatcagttctccacccaaggcaccccttctggcagccccttccccagccagcagactacaatgtatcaacagcaacagcagaattacaagcggccaatggatggcacatatggccctcctgccaagcggcacgaaggggagatgtacagcgtgccatacagcactgggcaggggcagcctcagcagcagcagttgcccccagcccagccccagcctgccagccagcaacaagctgcccagccttcccctcagcaagatgtatacaaccagtatggcaatgcctatcctgccactgccacagctgctactgagcgccgaccagcaggcggcccccagaaccaatttccattccagtttggccgagaccgtgtctctgcaccccctggcaccaatgcccagcaaaacatgccaccacaaatgatgggcggccccatacaggcatcagctgaggttgctcagcaaggcaccatgtggcaggggcgtaatgacatgacctataattatgccaacaggcagagcacgggctctgccccccagggccccgcctatcatggcgtgaaccgaacagatgaaatgctgcacacagatcagagggccaaccacgaaggctcgtggccttcccatggcacacgccagcccccatatggtccctctgcccctgtgccccccatgacaaggccccctccatctaactaccagcccccaccaagcatgcagaatcacattcctcaggtatccagccctgctcccctgccccggccaatggagaaccgcacctctcctagcaagtctccattcctgcactctgggatgaaaatgcagaaggcaggtcccccagtacctgcctcgcacatagcacctgcccctgtgcagccccccatgattcggcgggatatcaccttcccacctggctctgttgaagccacacagcctgtgttgaagcagaggaggcggctcacaatgaaagacattggaaccccggaggcatggcgggtaatgatgtccctcaagtctggtctcctggcagagagcacatgggcattagataccatcaacatcctgctgtatgatgacaacagcatcatgaccttcaacctcagtcagctcccagggttgctagagctccttgtagaatatttccgacgatgcctgattgagatctttggcattttaaaggagtatgaggtgggtgacccaggacagagaacgctactggatcctgggaggttcagcaaggtgtctagtccagctcccatggagggtggggaagaagaaggaagaacttctaggtcctaaactagaagaggaagaagaagaggaagtagttgaaaatgatgaggagatagccttttcaggcaaggacaagccagcttcagagaatagtgaggagaagctgatcagtaagtttgacaagcttccagtaaagatcgtacagaagaatgatccatttgtggtggactgctcagataagcttgggcgtgtgcaggagtttgacagtggcctgctgcactggcggattggtgggggggacaccactgagcatatccagacccacttcgagagcaagacagagctgctgccttcccggcctcacgcaccctgcccaccagcccctcggaagcatgtgacaacagcagagggtacaccagggacaacagaccaggaggggcccccacctgatggacctccagaaaaacggatcacagccactatggatgacatgttgtctactcggtctagcaccttgaccgaggatggagctaagagttcagaggccatcaaggagagcagcaagtttccatttggcattagcccagcacagagccaccggaacatcaagatcctagaggacgaaccccacagtaaggatgagaccccactgtgtacccttctggactggcaggattctcttgccaagcgctgcgtctgtgtgtccaataccattcgaagcctgtcatttgtgccaggcaatgactttgagatgtccaaacacccagggctgctgctcatcctgggcaagctgatcctgctgcaccacaagcacccagaacggaagcaggcaccactaacttatgaaaaggaggaggaacaggaccaaggggtgagctgcaacaaagtggagtggtggtgggactgcttggagatgctccgggaaaacaccttggttacactcgccaacatctcggggcagttggacctatctccataccccgagagcatttgcctgcctgtcctggacggactcctacactgggcagtttgcccttcagctgaagcccaggaccccttttccaccctgggccccaatgccgtcctttccccgcagagactggtcttggaaaccctcagcaaactcagcatccaggacaacaatgtggacctgattctggccacaccccccttcagccgcctggagaagttgtatagcactatggtgcgcttcctcagtgaccgaaagaacccggtgtgccgggagatggctgtggtactgctggccaacctggctcagggggacagcctggcagctcgtgccattgcagtgcagaagggcagtatcggcaacctcctgggcttcctagaggacagccttgccgccacacagttccagcagagccaggccagcctcctccacatgcagaacccaccctttgagccaactagtgtggacatgatgcggcgggctgcccgcgcgctgcttgccttggccaaggtggacgagaaccactcagagtttactctgtacgaatcacggctgttggacatctcggtatcaccgttgatgaactcattggtttcacaagtcatttgtgatgtactgtttttgattggccagtcatgacagccgtgggacacctcccccccccgtgtgtgtgtgcgtgtgtggagaacttagaaactgactgttgccctttatttatgcaaaaccacctcagaatccagtttaccctgtgctgtccagcttctcccttgggaaaaagtctctcctgtttctctctcctccttccacctcccctccctccatcacctcacgcctttctgttccttgtcctcaccttactcccctcaggaccctaccccaccctctttgaaaagacaaagctctgcctacatagaagactttttttattttaaccaaagttactgttgtttacagtgagtttggggaaaaaaaataaaataaaaatggctttcccagtccttgcatcaacgggatgccacatttcataactgtttttaatggtaaaaaaaaaaaaaaaaaatacaaaaaaaaattctgaaggacaaaaaaggtgactgctgaactgtgtgtggtttattgttgtacattcacaatcttgcaggagccaagaagttcgcagttgtgaacagaccctgttcactggagaggcctgtgcagtagagtgtagaccctttcatgtactgtactgtacacctgatactgtaaacatactgtaataataatgtctcacatggaaacagaaaacgctgggtcagcagcaagctgtagtttttaaaaatgtttttagttaaacgttgaggagaaaaaaaaaaaaggcttttcccccaaagtatcatgtgtgaacctacaacaccctgacctctttctctcctccttgattgtatgaataaccctgagatcacctcttagaactggttttaacctttagctgcagcggctacgctgccacgtgtgtatatatatgacgttgtacattgcacatacccttggatccccacagtttggtcctcctcccagctacccctttatagtatgacgagttaacaagttggtgacctgcacaaagcgagacacagctatttaatctcttgccagatatcgcccctcttggtgcgatgctgtacaggtctctgtaaaaagtccttgctgtctcagcagccaatcaacttatagtttatttttttctgggtttttgttttgttttgttttctttctaatcgaggtgtgaaaaagttctaggttcagttgaagttctgatgaagaaacacaattgagattttttcagtgataaaatctgcatatttgtatttcaacaatgtagctaaaacttgatgtaaattcctcctttttttccttttttggcttaatgaatatcatttattcagtatgaaatctttatactatatgttccacgtgttaagaataaatgtacattaaatcttggtaagacttt

SEQ ID NO: 47 - DNA, 8587 bp, Homo sapiens
cagaaagcggagagtcacagcggggccaggccctggggagcggagcctccaccgcccccctcattcccaggcaagggcttggggggaatgagccgggagagccgggtcccgagcctacagagccgggagcagctgagccgccggcgcctcggccgccgccgccgcctcctcctcctccgccgccgccagcccggagcctgagccggcggggcgggggggagaggagcgagcgcagcgcagcagcggagccccgcgaggcccgcccgggcgggtggggagggcagcccgggggactgggccccggggcggggtgggagggggggagaagacgaagacagggccgggtctctccgcggacgagacagcggggatcatggccgcgcaggtcgcccccgccgccgccagcagcctgggcaacccgccgccgccgccgccctcggagctgaagaaagccgagcagcagcagcgggaggaggcggggggcgaggcggcggcggcggcagcggccgagcgcggggaaatgaaggcagccgccgggcaggaaagcgagggccccgccgtggggccgccgcagccgctgggaaaggagctgcaggacggggccgagagcaatgggggtggcggcggcggcggagccggcagcggcggcgggcccggcgcggagccggacctgaagaactcgaacgggaacgcgggccctaggcccgccctgaacaataacctcacggagccgcccggcggcggcggtggcggcagcagcgatggggtgggggcgcctcctcactcagccgcggccgccttgccgcccccagcctacggcttcgggcaaccctacggccggagcccgtctgccgtcgccgccgccgcggccgccgtcttccaccaacaacatggcggacaacaaagccctggcctggcagcgctgcagagcggcggcggcgggggcctggagccctacgcggggccccagcagaactctcacgaccacggcttccccaaccaccagtacaactcctactaccccaaccgcagcgcctaccccccgcccgccccggcctacgcgctgagctccccgagaggtggcactccgggctccggcgcggcggcggctgccggctccaagccgcctccctcctccagcgcctccgcctcctcgtcgtcttcgtccttcgctcagcagcgcttcggggccatggggggaggcggcccctccgcggccggcgggggaactccccagcccaccgccacccccaccctcaaccaactgctcacgtcgcccagctcggcccggggctaccagggctaccccgggggcgactacagtggcgggccccaggacgggggcgccggcaagggcccggcggacatggcctcgcagtgttggggggctgcggcggcggcagctgcggcggcggccgcctcgggaggggcccaacaaaggagccaccacgcgcccatgagccccgggagcagcggcggcggggggcagccgctcgcccggacccctcagccatccagtccaatggatcagatgggcaagatgagacctcagccatatggcgggactaacccatactcgcagcaacagggacctccgtcaggaccgcagcaaggacatgggtacccagggcagccatacgggtcccagaccccgcagcggtacccgatgaccatgcagggccgggcgcagagtgccatgggcggcctctcttatacacagcagattcctccttatggacaacaaggccccagcgggtatggtcaacagggccagactccatattacaaccagcaaagtcctcaccctcagcagcagcagccaccctactcccagcaaccaccgtcccagacccctcatgcccaaccttcgtatcagcagcagccacagtctcaaccaccacagctccagtcctctcagcctccatactcccagcagccatcccagcctccacatcagcagtccccggctccatacccctcccagcagtcgacgacacagcagcacccccagagccagcccccctactcacagccacaggctcagtctccttaccagcagcagcaacctcagcagccagcaccctcgacgctctcccagcaggctgcgtatcctcagccccagtctcagcagtcccagcaaactgcctattcccagcagcgcttccctccaccgcaggagctatctcaagattcatttgggtctcaggcatcctcagccccctcaatgacctccagtaagggagggcaagaagatatgaacctgagccttcagtcaagaccctccagcttgcctgatctatctggttcaatagatgacctccccatggggacagaaggagctctgagtcctggagtgagcacatcagggatttccagcagccaaggagagcagagtaatccagctcagtctcctttctctcctcatacctcccctcacctgcctggcatccgaggcccttccccgtcccctgttggctctcccgccagtgttgctcagtctcgctcaggaccactctcgcctgctgcagtgccaggcaaccagatgccacctcggccacccagtggccagtcggacagcatcatgcatccttccatgaaccaatcaagcattgcccaagatcgaggttatatgcagaggaacccccagatgccccagtacagttccccccagcccggctcagccttatctccgcgtcagccttccggaggacagatacacacaggcatgggctcctaccagcagaactccatggggagctatggtccccaggggggtcagtatggcccacaaggtggctaccccaggcagccaaactataatgccttgcccaatgccaactaccccagtgcaggcatggctggaggcataaaccccatgggtgccggaggtcaaatgcatggacagcctggcatcccaccttatggcacactccctccagggaggatgagtcacgcctccatgggcaaccggccttatggccctaacatggccaatatgccacctcaggttgggtcagggatgtgtcccccaccagggggcatgaaccggaaaacccaagaaactgctgtcgccatgcatgttgctgccaactctctatccaaaacaggccgccaggctaccccaatatgaatcaagggggcatgatgggaactggacctccttatggacaagggattaatagtatggctggcatgatcaaccctcagggacccccatattccatgggtggaaccatggccaacaattctgcagggatggcagccagcccagagatgatgggccttggggatgtaaagttaactccagccaccaaaatgaacaacaaggcagatgggacacccaagacagaatccaaatccaagaaatccagttcttctactacaaccaatgagaagatcaccaagttgtatgagctgggtggtgagcctgagaggaagatgtgggtggaccgttatctggccttcactgaggagaaggccatgggcatgacaaatctgcctgctgtgggtaggaaacctctggacctctatcgcctctatgtgtctgtgaaggagattggtggattgactcaggtcaacaagaacaaaaaatggcgggaacttgcaaccaacctcaatgtgggcacatcaagcagtgctgccagctccttgaaaaagcagtatatccagtgtctctatgcctttgaatgcaagattgaacggggagaagaccctcccccagacatctttgcagctgctgattccaagaagtcccagcccaagatccagcctccctctcctgcgggatcaggatctatgcaggggccccagactccccagtcaaccagcagttccatggcagaaggaggagacttaaagccaccaactccagcatccacaccacacagtcagatccccccattgccaggcatgagcaggagcaattcagttgggatccaggatgcctttaatgatggaagtgactccacattccagaagcggaattccatgactccaaaccctgggtatcagcccagtatgaatacctctgacatgatggggcgcatgtcctatgagccaaataaggatccttatggcagcatgaggaaagctccagggagtgatcccttcatgtcctcagggcagggccccaacggcgggatgggtgacccctacagtcgtgctgccggccctgggctaggaaatgtggcgatgggaccacgacagcactatccctatggaggtccttatgacagagtgaggacggagcctggaatagggcctgagggaaacatgagcactggggccccacagccgaatctcatgccttccaacccagactcggggatgtattctcctagccgctaccccccgcagcagcagcagcagcagcagcaacgacatgattcctatggcaatcagttctccacccaaggcaccccttctggcagccccttccccagccagcagactacaatgtatcaacagcaacagcagaattacaagcggccaatggatggcacatatggccctcctgccaagcggcacgaaggggagatgtacagcgtgccatacagcactgggcaggggcagcctcagcagcagcagttgcccccagcccagccccagcctgccagccagcaacaagctgcccagccttcccctcagcaagatgtatacaaccagtatggcaatgcctatcctgccactgccacagctgctactgagcgccgaccagcaggcggcccccagaaccaatttccattccagtttggccgagaccgtgtctctgcaccccctggcaccaatgcccagcaaaacatgccaccacaaatgatgggcggccccatacaggcatcagctgaggttgctcagcaaggcaccatgtggcaggggcgtaatgacatgacctataattatgccaacaggcagagcacgggctctgccccccagggccccgcctatcatggcgtgaaccgaacagatgaaatgctgcacacagatcagagggccaaccacgaaggctcgtggccttcccatggcacacgccagcccccatatggtccctctgcccctgtgccccccatgacaaggccccctccatctaactaccagcccccaccaagcatgcagaatcacattcctcaggtatccagccctgctcccctgccccggccaatggagaaccgcacctctcctagcaagtctccattcctgcactctgggatgaaaatgcagaaggcaggtcccccagtacctgcctcgcacatagcacctgcccctgtgcagccccccatgattcggcgggatatcaccttcccacctggctctgttgaagccacacagcctgtgttgaagcagaggaggcggctcacaatgaaagacattggaaccccggaggcatggcgggtaatgatgtccctcaagtctggtctcctggcagagagcacatgggcattagataccatcaacatcctgctgtatgatgacaacagcatcatgaccttcaacctcagtcagctcccagggttgctagagctccttgtagaatatttccgacgatgcctgattgagatctttggcattttaaaggagtatgaggtgggtgacccaggacagagaacgctactggatcctgggaggttcagcaaggtgtctagtccagctcccatggagggtggggaagaagaagaagaacttctaggtcctaaactagaagaggaagaagaagaggaagtagttgaaaatgatgaggagatagccttttcaggcaaggacaagccagcttcagagaatagtgaggagaagctgatcagtaagtttgacaagcttccagtaaagatcgtacagaagaatgatccatttgtggtggactgctcagataagcttgggcgtgtgcaggagtttgacagtggcctgctgcactggcggattggtgggggggacaccactgagcatatccagacccacttcgagagcaagacagagctgctgccttcccggcctcacgcaccctgcccaccagcccctcggaagcatgtgacaacagcagagggtacaccagggacaacagaccaggaggggcccccacctgatggacctccagaaaaacggatcacagccactatggatgacatgttgtctactcggtctagcaccttgaccgaggatggagctaagagttcagaggccatcaaggagagcagcaagtttccatttggcattagcccagcacagagccaccggaacatcaagatcctagaggacgaaccccacagtaaggatgagaccccactgtgtacccttctggactggcaggattctcttgccaagcgctgcgtctgtgtgtccaataccattcgaagcctgtcatttgtgccaggcaatgactttgagatgtccaaacacccagggctgctgctcatcctgggcaagctgatcctgctgcaccacaagcacccagaacggaagcaggcaccactaacttatgaaaaggaggaggaacaggaccaaggggtgagctgcaacaaagtggagtggtggtgggactgcttggagatgctccgggaaaacaccttggttacactcgccaacatctcggggcagttggacctatctccataccccgagagcatttgcctgcctgtcctggacggactcctacactgggcagtttgcccttcagctgaagcccaggaccccttttccaccctgggccccaatgccgtcctttccccgcagagactggtcttggaaaccctcagcaaactcagcatccaggacaacaatgtggacctgattctggccacaccccccttcagccgcctggagaagttgtatagcactatggtgcgcttcctcagtgaccgaaagaacccggtgtgccgggagatggctgtggtactgctggccaacctggctcagggggacagcctggcagctcgtgccattgcagtgcagaagggcagtatcggcaacctcctgggcttcctagaggacagccttgccgccacacagttccagcagagccaggccagcctcctccacatgcagaacccaccctttgagccaactagtgtggacatgatgcggcgggctgcccgcgcgctgcttgccttggccaaggtggacgagaaccactcagagtttactctgtacgaatcacggctgttggacatctcggtatcaccgttgatgaactcattggtttcacaagtcatttgtgatgtactgtttttgattggccagtcatgacagccgtgggacacctcccccccccgtgtgtgtgtgcgtgtgtggagaacttagaaactgactgttgccctttatttatgcaaaaccacctcagaatccagtttaccctgtgctgtccagcttctcccttgggaaaaagtctctcctgtttctctctcctccttccacctcccctccctccatcacctcacgcctttctgttccttgtcctcaccttactcccctcaggaccctaccccaccctctttgaaaagacaaagctctgcctacatagaagactttttttattttaaccaaagttactgttgtttacagtgagtttggggaaaaaaaataaaataaaaatggctttcccagtccttgcatcaacgggatgccacatttcataactgtttttaatggtaaaaaaaaaaaaaaaaaatacaaaaaaaaattctgaaggacaaaaaaggtgactgctgaactgtgtgtggtttattgttgtacattcacaatcttgcaggagccaagaagttcgcagttgtgaacagaccctgttcactggagaggcctgtgcagtagagtgtagaccctttcatgtactgtactgtacacctgatactgtaaacatactgtaataataatgtctcacatggaaacagaaaacgctgggtcagcagcaagctgtagtttttaaaaatgtttttagttaaacgttgaggagaaaaaaaaaaaaggcttttcccccaaagtatcatgtgtgaacctacaacaccctgacctctttctctcctccttgattgtatgaataaccctgagatcacctcttagaactggttttaacctttagctgcagcggctacgctgccacgtgtgtatatatatgacgttgtacattgcacatacccttggatccccacagtttggtcctcctcccagctacccctttatagtatgacgagttaacaagttggtgacctgcacaaagcgagacacagctatttaatctcttgccagatatcgcccctcttggtgcgatgctgtacaggtctctgtaaaaagtccttgctgtctcagcagccaatcaacttatagtttatttttttctgggtttttgttttgttttgttttctttctaatcgaggtgtgaaaaagttctaggttcagttgaagttctgatgaagaaacacaattgagattttttcagtgataaaatctgcatatttgtatttcaacaatgtagctaaaacttgatgtaaattcctcctttttttccttttttggcttaatgaatatcatttattcagtatgaaatctttatactatatgttccacgtgttaagaataaatgtacattaaatcttggtaagacttt

SEQ ID NO: 48 - DNA, 8584 bp, Homo sapiens
cagaaagcggagagtcacagcggggccaggccctggggagcggagcctccaccgcccccctcattcccaggcaagggcttggggggaatgagccgggagagccgggtcccgagcctacagagccgggagcagctgagccgccggcgcctcggccgccgccgccgcctcctcctcctccgccgccgccagcccggagcctgagccggcggggcgggggggagaggagcgagcgcagcgcagcagcggagccccgcgaggcccgcccgggcgggtggggagggcagcccgggggactgggccccggggcggggtgggagggggggagaagacgaagacagggccgggtctctccgcggacgagacagcggggatcatggccgcgcaggtcgcccccgccgccgccagcagcctgggcaacccgccgccgccgccgccctcggagctgaagaaagccgagcagcagcagcgggaggaggcggggggcgaggcggcggcggcggcagcggccgagcgcggggaaatgaaggcagccgccgggcaggaaagcgagggccccgccgtggggccgccgcagccgctgggaaaggagctgcaggacggggccgagagcaatgggggtggcggcggcggcggagccggcagcggcggcgggcccggcgcggagccggacctgaagaactcgaacgggaacgcgggccctaggcccgccctgaacaataacctcacggagccgcccggcggcggcggtggcggcagcagcgatggggtgggggcgcctcctcactcagccgcggccgccttgccgcccccagcctacggcttcgggcaaccctacggccggagcccgtctgccgtcgccgccgccgcggccgccgtcttccaccaacaacatggcggacaacaaagccctggcctggcagcgctgcagagcggcggcggcgggggcctggagccctacgcggggccccagcagaactctcacgaccacggcttccccaaccaccagtacaactcctactaccccaaccgcagcgcctaccccccgcccgccccggcctacgcgctgagctccccgagaggtggcactccgggctccggcgcggcggcggctgccggctccaagccgcctccctcctccagcgcctccgcctcctcgtcgtcttcgtccttcgctcagcagcgcttcggggccatggggggaggcggcccctccgcggccggcgggggaactccccagcccaccgccacccccaccctcaaccaactgctcacgtcgcccagctcggcccggggctaccagggctaccccgggggcgactacagtggcgggccccaggacgggggcgccggcaagggcccggcggacatggcctcgcagtgttggggggctgcggcggcggcagctgcggcggcggccgcctcgggaggggcccaacaaaggagccaccacgcgcccatgagccccgggagcagcggcggcgggggcagccgctcgcccggacccctcagccatccagtccaatggatcagatgggcaagatgagacctcagccatatggcgggactaacccatactcgcagcaacagggacctccgtcaggaccgcagcaaggacatgggtacccagggcagccatacgggtcccagaccccgcagcggtacccgatgaccatgcagggccgggcgcagagtgccatgggcggcctctcttatacacagcagattcctccttatggacaacaaggccccagcgggtatggtcaacagggccagactccatattacaaccagcaaagtcctcaccctcagcagcagcagccaccctactcccagcaaccaccgtcccagacccctcatgcccaaccttcgtatcagcagcagccacagtctcaaccaccacagctccagtcctctcagcctccatactcccagcagccatcccagcctccacatcagcagtccccggctccatacccctcccagcagtcgacgacacagcagcacccccagagccagcccccctactcacagccacaggctcagtctccttaccagcagcagcaacctcagcagccagcaccctcgacgctctcccagcaggctgcgtatcctcagccccagtctcagcagtcccagcaaactgcctattcccagcagcgcttccctccaccgcaggagctatctcaagattcatttgggtctcaggcatcctcagccccctcaatgacctccagtaagggagggcaagaagatatgaacctgagccttcagtcaagaccctccagcttgcctgatctatctggttcaatagatgacctccccatggggacagaaggagctctgagtcctggagtgagcacatcagggatttccagcagccaaggagagcagagtaatccagctcagtctcctttctctcctcatacctcccctcacctgcctggcatccgaggcccttccccgtcccctgttggctctcccgccagtgttgctcagtctcgctcaggaccactctcgcctgctgcagtgccaggcaaccagatgccacctcggccacccagtggccagtcggacagcatcatgcatccttccatgaaccaatcaagcattgcccaagatcgaggttatatgcagaggaacccccagatgccccagtacagttccccccagcccggctcagccttatctccgcgtcagccttccggaggacagatacacacaggcatgggctcctaccagcagaactccatggggagctatggtccccaggggggtcagtatggcccacaaggtggctaccccaggcagccaaactataatgccttgcccaatgccaactaccccagtgcaggcatggctggaggcataaaccccatgggtgccggaggtcaaatgcatggacagcctggcatcccaccttatggcacactccctccagggaggatgagtcacgcctccatgggcaaccggccttatggccctaacatggccaatatgccacctcaggttgggtcagggatgtgtcccccaccagggggcatgaaccggaaaacccaagaaactgctgtcgccatgcatgttgctgccaactctatccaaaacaggccgccaggctaccccaatatgaatcaagggggcatgatgggaactggacctccttatggacaagggattaatagtatggctggcatgatcaaccctcagggacccccatattccatgggtggaaccatggccaacaattctgcagggatggcagccagcccagagatgatgggccttggggatgtaaagttaactccagccaccaaaatgaacaacaaggcagatgggacacccaagacagaatccaaatccaagaaatccagttcttctactacaaccaatgagaagatcaccaagttgtatgagctgggtggtgagcctgagaggaagatgtgggtggaccgttatctggccttcactgaggagaaggccatgggcatgacaaatctgcctgctgtgggtaggaaacctctggacctctatcgcctctatgtgtctgtgaaggagattggtggattgactcaggtcaacaagaacaaaaaatggcgggaacttgcaaccaacctcaatgtgggcacatcaagcagtgctgccagctccttgaaaaagcagtatatccagtgtctctatgcctttgaatgcaagattgaacggggagaagaccctcccccagacatctttgcagctgctgattccaagaagtcccagcccaagatccagcctccctctcctgcgggatcaggatctatgcaggggccccagactccccagtcaaccagcagttccatggcagaaggaggagacttaaagccaccaactccagcatccacaccacacagtcagatccccccattgccaggcatgagcaggagcaattcagttgggatccaggatgcctttaatgatggaagtgactccacattccagaagcggaattccatgactccaaaccctgggtatcagcccagtatgaatacctctgacatgatggggcgcatgtcctatgagccaaataaggatccttatggcagcatgaggaaagctccagggagtgatcccttcatgtcctcagggcagggccccaacggcgggatgggtgacccctacagtcgtgctgccggccctgggctaggaaatgtggcgatgggaccacgacagcactatccctatggaggtccttatgacagagtgaggacggagcctggaatagggcctgagggaaacatgagcactggggccccacagccgaatctcatgccttccaacccagactcggggatgtattctcctagccgctaccccccgcagcagcagcagcagcagcagcaacgacatgattcctatggcaatcagttctccacccaaggcaccccttctggcagccccttccccagccagcagactacaatgtatcaacagcaacagcagaattacaagcggccaatggatggcacatatggccctcctgccaagcggcacgaaggggagatgtacagcgtgccatacagcactgggcaggggcagcctcagcagcagcagttgcccccagcccagccccagcctgccagccagcaacaagctgcccagccttcccctcagcaagatgtatacaaccagtatggcaatgcctatcctgccactgccacagctgctactgagcgccgaccagcaggcggcccccagaaccaatttccattccagtttggccgagaccgtgtctctgcaccccctggcaccaatgcccagcaaaacatgccaccacaaatgatgggcggccccatacaggcatcagctgaggttgctcagcaaggcaccatgtggcaggggcgtaatgacatgacctataattatgccaacaggcagagcacgggctctgccccccagggccccgcctatcatggcgtgaaccgaacagatgaaatgctgcacacagatcagagggccaaccacgaaggctcgtggccttcccatggcacacgccagcccccatatggtccctctgcccctgtgccccccatgacaaggccccctccatctaactaccagcccccaccaagcatgcagaatcacattcctcaggtatccagccctgctcccctgccccggccaatggagaaccgcacctctcctagcaagtctccattcctgcactctgggatgaaaatgcagaaggcaggtcccccagtacctgcctcgcacatagcacctgcccctgtgcagccccccatgattcggcgggatatcaccttcccacctggctctgttgaagccacacagcctgtgttgaagcagaggaggcggctcacaatgaaagacattggaaccccggaggcatggcgggtaatgatgtccctcaagtctggtctcctggcagagagcacatgggcattagataccatcaacatcctgctgtatgatgacaacagcatcatgaccttcaacctcagtcagctcccagggttgctagagctccttgtagaatatttccgacgatgcctgattgagatctttggcattttaaaggagtatgaggtgggtgacccaggacagagaacgctactggatcctgggaggttcagcaaggtgtctagtccagctcccatggagggtggggaagaagaagaagaacttctaggtcctaaactagaagaggaagaagaagaggaagtagttgaaaatgatgaggagatagccttttcaggcaaggacaagccagcttcagagaatagtgaggagaagctgatcagtaagtttgacaagcttccagtaaagatcgtacagaagaatgatccatttgtggtggactgctcagataagcttgggcgtgtgcaggagtttgacagtggcctgctgcactggcggattggtgggggggacaccactgagcatatccagacccacttcgagagcaagacagagctgctgccttcccggcctcacgcaccctgcccaccagcccctcggaagcatgtgacaacagcagagggtacaccagggacaacagaccaggaggggcccccacctgatggacctccagaaaaacggatcacagccactatggatgacatgttgtctactcggtctagcaccttgaccgaggatggagctaagagttcagaggccatcaaggagagcagcaagtttccatttggcattagcccagcacagagccaccggaacatcaagatcctagaggacgaaccccacagtaaggatgagaccccactgtgtacccttctggactggcaggattctcttgccaagcgctgcgtctgtgtgtccaataccattcgaagcctgtcatttgtgccaggcaatgactttgagatgtccaaacacccagggctgctgctcatcctgggcaagctgatcctgctgcaccacaagcacccagaacggaagcaggcaccactaacttatgaaaaggaggaggaacaggaccaaggggtgagctgcaacaaagtggagtggtggtgggactgcttggagatgctccgggaaaacaccttggttacactcgccaacatctcggggcagttggacctatctccataccccgagagcatttgcctgcctgtcctggacggactcctacactgggcagtttgcccttcagctgaagcccaggaccccttttccaccctgggccccaatgccgtcctttccccgcagagactggtcttggaaaccctcagcaaactcagcatccaggacaacaatgtggacctgattctggccacaccccccttcagccgcctggagaagttgtatagcactatggtgcgcttcctcagtgaccgaaagaacccggtgtgccgggagatggctgtggtactgctggccaacctggctcagggggacagcctggcagctcgtgccattgcagtgcagaagggcagtatcggcaacctcctgggcttcctagaggacagccttgccgccacacagttccagcagagccaggccagcctcctccacatgcagaacccaccctttgagccaactagtgtggacatgatgcggcgggctgcccgcgcgctgcttgccttggccaaggtggacgagaaccactcagagtttactctgtacgaatcacggctgttggacatctcggtatcaccgttgatgaactcattggtttcacaagtcatttgtgatgtactgtttttgattggccagtcatgacagccgtgggacacctcccccccccgtgtgtgtgtgcgtgtgtggagaacttagaaactgactgttgccctttatttatgcaaaaccacctcagaatccagtttaccctgtgctgtccagcttctcccttgggaaaaagtctctcctgtttctctctcctccttccacctcccctccctccatcacctcacgcctttctgttccttgtcctcaccttactcccctcaggaccctaccccaccctctttgaaaagacaaagctctgcctacatagaagactttttttattttaaccaaagttactgttgtttacagtgagtttggggaaaaaaaataaaataaaaatggctttcccagtccttgcatcaacgggatgccacatttcataactgtttttaatggtaaaaaaaaaaaaaaaaaatacaaaaaaaaattctgaaggacaaaaaaggtgactgctgaactgtgtgtggtttattgttgtacattcacaatcttgcaggagccaagaagttcgcagttgtgaacagaccctgttcactggagaggcctgtgcagtagagtgtagaccctttcatgtactgtactgtacacctgatactgtaaacatactgtaataataatgtctcacatggaaacagaaaacgctgggtcagcagcaagctgtagtttttaaaaatgtttttagttaaacgttgaggagaaaaaaaaaaaaggcttttcccccaaagtatcatgtgtgaacctacaacaccctgacctctttctctcctccttgattgtatgaataaccctgagatcacctcttagaactggttttaacctttagctgcagcggctacgctgccacgtgtgtatatatatgacgttgtacattgcacatacccttggatccccacagtttggtcctcctcccagctacccctttatagtatgacgagttaacaagttggtgacctgcacaaagcgagacacagctatttaatctcttgccagatatcgcccctcttggtgcgatgctgtacaggtctctgtaaaaagtccttgctgtctcagcagccaatcaacttatagtttatttttttctgggtttttgttttgttttgttttctttctaatcgaggtgtgaaaaagttctaggttcagttgaagttctgatgaagaaacacaattgagattttttcagtgataaaatctgcatatttgtatttcaacaatgtagctaaaacttgatgtaaattcctcctttttttccttttttggcttaatgaatatcatttattcagtatgaaatctttatactatatgttccacgtgttaagaataaatgtacattaaatcttggtaagacttt

SEQ ID NO: 49 - DNA, 8584 bp, Homo sapiens
cagaaagcggagagtcacagcggggccaggccctggggagcggagcctccaccgcccccctcattcccaggcaagggcttggggggaatgagccgggagagccgggtcccgagcctacagagccgggagcagctgagccgccggcgcctcggccgccgccgccgcctcctcctcctccgccgccgccagcccggagcctgagccggcggggcgggggggagaggagcgagcgcagcgcagcagcggagccccgcgaggcccgcccgggcgggtggggagggcagcccgggggactgggccccggggcggggtgggagggggggagaagacgaagacagggccgggtctctccgcggacgagacagcggggatcatggccgcgcaggtcgcccccgccgccgccagcagcctgggcaacccgccgccgccgccgccctcggagctgaagaaagccgagcagcagcagcgggaggaggcggggggcgaggcggcggcggcggcagcggccgagcgcggggaaatgaaggcagccgccgggcaggaaagcgagggccccgccgtggggccgccgcagccgctgggaaaggagctgcaggacggggccgagagcaatgggggtggcggcggcggcggagccggcagcggcggcgggcccggcgcggagccggacctgaagaactcgaacgggaacgcgggccctaggcccgccctgaacaataacctcacggagccgcccggcggcggcggtggcggcagcagcgatggggtgggggcgcctcctcactcagccgcggccgccttgccgcccccagcctacggcttcgggcaaccctacggccggagcccgtctgccgtcgccgccgccgcggccgccgtcttccaccaacaacatggcggacaacaaagccctggcctggcagcgctgcagagcggcggcggcgggggcctggagccctacgcggggccccagcagaactctcacgaccacggcttccccaaccaccagtacaactcctactaccccaaccgcagcgcctaccccccgcccgccccggcctacgcgctgagctccccgagaggtggcactccgggctccggcgcggcggcggctgccggctccaagccgcctccctcctccagcgcctccgcctcctcgtcgtcttcgtccttcgctcagcagcgcttcggggccatggggggaggcggcccctccgcggccggcgggggaactccccagcccaccgccacccccaccctcaaccaactgctcacgtcgcccagctcggcccggggctaccagggctaccccgggggcgactacagtggcgggccccaggacgggggcgccggcaagggcccggcggacatggcctcgcagtgttggggggctgcggcggcggcagctgcggcggcggccgcctcgggaggggcccaacaaaggaccaccacgcgcccatgagccccgggagcagcggcggcggggggcagccgctcgcccggacccctcagccatccagtccaatggatcagatgggcaagatgagacctcagccatatggcgggactaacccatactcgcagcaacagggacctccgtcaggaccgcagcaaggacatgggtacccagggcagccatacgggtcccagaccccgcagcggtacccgatgaccatgcagggccgggcgcagagtgccatgggcggcctctcttatacacagcagattcctccttatggacaacaaggccccagcgggtatggtcaacagggccagactccatattacaaccagcaaagtcctcaccctcagcagcagcagccaccctactcccagcaaccaccgtcccagacccctcatgcccaaccttcgtatcagcagcagccacagtctcaaccaccacagctccagtcctctcagcctccatactcccagcagccatcccagcctccacatcagcagtccccggctccatacccctcccagcagtcgacgacacagcagcacccccagagccagcccccctactcacagccacaggctcagtctccttaccagcagcagcaacctcagcagccagcaccctcgacgctctcccagcaggctgcgtatcctcagccccagtctcagcagtcccagcaaactgcctattcccagcagcgcttccctccaccgcaggagctatctcaagattcatttgggtctcaggcatcctcagccccctcaatgacctccagtaagggagggcaagaagatatgaacctgagccttcagtcaagaccctccagcttgcctgatctatctggttcaatagatgacctccccatggggacagaaggagctctgagtcctggagtgagcacatcagggatttccagcagccaaggagagcagagtaatccagctcagtctcctttctctcctcatacctcccctcacctgcctggcatccgaggcccttccccgtcccctgttggctctcccgccagtgttgctcagtctcgctcaggaccactctcgcctgctgcagtgccaggcaaccagatgccacctcggccacccagtggccagtcggacagcatcatgcatccttccatgaaccaatcaagcattgcccaagatcgaggttatatgcagaggaacccccagatgccccagtacagttccccccagcccggctcagccttatctccgcgtcagccttccggaggacagatacacacaggcatgggctcctaccagcagaactccatggggagctatggtccccaggggggtcagtatggcccacaaggtggctaccccaggcagccaaactataatgccttgcccaatgccaactaccccagtgcaggcatggctggaggcataaaccccatgggtgccggaggtcaaatgcatggacagcctggcatcccaccttatggcacactccctccagggaggatgagtcacgcctccatgggcaaccggccttatggccctaacatggccaatatgccacctcaggttgggtcagggatgtgtcccccaccagggggcatgaaccggaaaacccaagaaactgctgtcgccatgcatgttgctgccaactctatccaaaacaggccgccaggctaccccaatatgaatcaagggggcatgatgggaactggacctccttatggacaagggattaatagtatggctggcatgatcaaccctcagggacccccatattccatgggtggaaccatggccaacaattctgcagggatggcagccagcccagagatgatgggccttggggatgtaaagttaactccagccaccaaaatgaacaacaaggcagatgggacacccaagacagaatccaaatccaagaaatccagttcttctactacaaccaatgagaagatcaccaagttgtatgagctgggtggtgagcctgagaggaagatgtgggtggaccgttatctggccttcactgaggagaaggccatgggcatgacaaatctgcctgctgtgggtaggaaacctctggacctctatcgcctctatgtgtctgtgaaggagattggtggattgactcaggtcaacaagaacaaaaaatggcgggaacttgcaaccaacctcaatgtgggcacatcaagcagtgctgccagctccttgaaaaagcagtatatccagtgtctctatgcctttgaatgcaagattgaacggggagaagaccctcccccagacatctttgcagctgctgattccaagaagtcccagcccaagatccagcctccctctcctgcgggatcaggatctatgcaggggccccagactccccagtcaaccagcagttccatggcagaaggaggagacttaaagccaccaactccagcatccacaccacacagtcagatccccccattgccaggcatgagcaggagcaattcagttgggatccaggatgcctttaatgatggaagtgactccacattccagaagcggaattccatgactccaaaccctgggtatcagcccagtatgaatacctctgacatgatggggcgcatgtcctatgagccaaataaggatccttatggcagcatgaggaaagctccagggagtgatcccttcatgtcctcagggcagggccccaacggcgggatgggtgacccctacagtcgtgctgccggccctgggctaggaaatgtggcgatgggaccacgacagcactatccctatggaggtccttatgacagagtgaggacggagcctggaatagggcctgagggaaacatgagcactggggccccacagccgaatctcatgccttccaacccagactcggggatgtattctcctagccgctaccccccgcagcagcagcagcagcagcagcaacgacatgattcctatggcaatcagttctccacccaaggcaccccttctggcagccccttccccagccagcagactacaatgtatcaacagcaacagcagaattacaagcggccaatggatggcacatatggccctcctgccaagcggcacgaaggggagatgtacagcgtgccatacagcactgggcaggggcagcctcagcagcagcagttgcccccagcccagccccagcctgccagccagcaacaagctgcccagccttcccctcagcaagatgtatacaaccagtatggcaatgcctatcctgccactgccacagctgctactgagcgccgaccagcaggcggcccccagaaccaatttccattccagtttggccgagaccgtgtctctgcaccccctggcaccaatgcccagcaaaacatgccaccacaaatgatgggcggccccatacaggcatcagctgaggttgctcagcaaggcaccatgtggcaggggcgtaatgacatgacctataattatgccaacaggcagagcacgggctctgccccccagggccccgcctatcatggcgtgaaccgaacagatgaaatgctgcacacagatcagagggccaaccacgaaggctcgtggccttcccatggcacacgccagcccccatatggtccctctgcccctgtgccccccatgacaaggccccctccatctaactaccagcccccaccaagcatgcagaatcacattcctcaggtatccagccctgctcccctgccccggccaatggagaaccgcacctctcctagcaagtctccattcctgcactctgggatgaaaatgcagaaggcaggtcccccagtacctgcctcgcacatagcacctgcccctgtgcagccccccatgattcggcgggatatcaccttcccacctggctctgttgaagccacacagcctgtgttgaagcagaggaggcggctcacaatgaaagacattggaaccccggaggcatggcgggtaatgatgtccctcaagtctggtctcctggcagagagcacatgggcattagataccatcaacatcctgctgtatgatgacaacagcatcatgaccttcaacctcagtcagctcccagggttgctagagctccttgtagaatatttccgacgatgcctgattgagatctttggcattttaaaggagtatgaggtgggtgacccaggacagagaacgctactggatcctgggaggttcagcaaggtgtctagtccagctcccatggagggtggggaagaagaagaagaacttctaggtcctaaactagaagaggaagaagaagaggaagtagttgaaaatgatgaggagatagccttttcaggcaaggacaagccagcttcagagaatagtgaggagaagctgatcagtaagtttgacaagcttccagtaaagatcgtacagaagaatgatccatttgtggtggactgctcagataagcttgggcgtgtgcaggagtttgacagtggcctgctgcactggcggattggtgggggggacaccactgagcatatccagacccacttcgagagcaagacagagctgctgccttcccggcctcacgcaccctgcccaccagcccctcggaagcatgtgacaacagcagagggtacaccagggacaacagaccaggaggggcccccacctgatggacctccagaaaaacggatcacagccactatggatgacatgttgtctactcggtctagcaccttgaccgaggatggagctaagagttcagaggccatcaaggagagcagcaagtttccatttggcattagcccagcacagagccaccggaacatcaagatcctagaggacgaaccccacagtaaggatgagaccccactgtgtacccttctggactggcaggattctcttgccaagcgctgcgtctgtgtgtccaataccattcgaagcctgtcatttgtgccaggcaatgactttgagatgtccaaacacccagggctgctgctcatcctgggcaagctgatcctgctgcaccacaagcacccagaacggaagcaggcaccactaacttatgaaaaggaggaggaacaggaccaaggggtgagctgcaacaaagtggagtggtggtgggactgcttggagatgctccgggaaaacaccttggttacactcgccaacatctcggggcagttggacctatctccataccccgagagcatttgcctgcctgtcctggacggactcctacactgggcagtttgcccttcagctgaagcccaggaccccttttccaccctgggccccaatgccgtcctttccccgcagagactggtcttggaaaccctcagcaaactcagcatccaggacaacaatgtggacctgattctggccacaccccccttcagccgcctggagaagttgtatagcactatggtgcgcttcctcagtgaccgaaagaacccggtgtgccgggagatggctgtggtactgctggccaacctggctcagggggacagcctggcagctcgtgccattgcagtgcagaagggcagtatcggcaacctcctgggcttcctagaggacagccttgccgccacacagttccagcagagccaggccagcctcctccacatgcagaacccaccctttgagccaactagtgtggacatgatgcggcgggctgcccgcgcgctgcttgccttggccaaggtggacgagaaccactcagagtttactctgtacgaatcacggctgttggacatctcggtatcaccgttgatgaactcattggtttcacaagtcatttgtgatgtactgtttttgattggccagtcatgacagccgtgggacacctcccccccccgtgtgtgtgtgcgtgtgtggagaacttagaaactgactgttgccctttatttatgcaaaaccacctcagaatccagtttaccctgtgctgtccagcttctcccttgggaaaaagtctctcctgtttctctctcctccttccacctcccctccctccatcacctcacgcctttctgttccttgtcctcaccttactcccctcaggaccctaccccaccctctttgaaaagacaaagctctgcctacatagaagactttttttattttaaccaaagttactgttgtttacagtgagtttggggaaaaaaaataaaataaaaatggctttcccagtccttgcatcaacgggatgccacatttcataactgtttttaatggtaaaaaaaaaaaaaaaaaatacaaaaaaaaattctgaaggacaaaaaaggtgactgctgaactgtgtgtggtttattgttgtacattcacaatcttgcaggagccaagaagttcgcagttgtgaacagaccctgttcactggagaggcctgtgcagtagagtgtagaccctttcatgtactgtactgtacacctgatactgtaaacatactgtaataataatgtctcacatggaaacagaaaacgctgggtcagcagcaagctgtagtttttaaaaatgtttttagttaaacgttgaggagaaaaaaaaaaaaggcttttcccccaaagtatcatgtgtgaacctacaacaccctgacctctttctctcctccttgattgtatgaataaccctgagatcacctcttagaactggttttaacctttagctgcagcggctacgctgccacgtgtgtatatatatgacgttgtacattgcacatacccttggatccccacagtttggtcctcctcccagctacccctttatagtatgacgagttaacaagttggtgacctgcacaaagcgagacacagctatttaatctcttgccagatatcgcccctcttggtgcgatgctgtacaggtctctgtaaaaagtccttgctgtctcagcagccaatcaacttatagtttatttttttctgggtttttgttttgttttgttttctttctaatcgaggtgtgaaaaagttctaggttcagttgaagttctgatgaagaaacacaattgagattttttcagtgataaaatctgcatatttgtatttcaacaatgtagctaaaacttgatgtaaattcctcctttttttccttttttggcttaatgaatatcatttattcagtatgaaatctttatactatatgttccacgtgttaagaataaatgtacattaaatcttggtaagacttt

SEQ ID NO: 50 - DNA, 8583 bp, Homo sapiens
cagaaagcggagagtcacagcggggccaggccctggggagcggagcctccaccgcccccctcattcccaggcaagggcttggggggaatgagccgggagagccgggtcccgagcctacagagccgggagcagctgagccgccggcgcctcggccgccgccgccgcctcctcctcctccgccgccgccagcccggagcctgagccggcggggcgggggggagaggagcgagcgcagcgcagcagcggagccccgcgaggcccgcccgggcgggtggggagggcagcccgggggactgggccccggggcggggtgggagggggggagaagacgaagacagggccgggtctctccgcggacgagacagcggggatcatggccgcgcaggtcgcccccgccgccgccagcagcctgggcaacccgccgccgccgccgccctcggagctgaagaaagccgagcagcagcagcgggaggaggcggggggcgaggcggcggcggcggcagcggccgagcgcggggaaatgaaggcagccgccgggcaggaaagcgagggccccgccgtggggccgccgcagccgctgggaaaggagctgcaggacggggccgagagcaatgggggtggcggcggcggcggagccggcagcggcggcgggcccggcgcggagccggacctgaagaactcgaacgggaacgcgggccctaggcccgccctgaacaataacctcacggagccgcccggcggcggcggtggcggcagcagcgatggggtgggggcgcctcctcactcagccgcggccgccttgccgcccccagcctacggcttcgggcaaccctacggccggagcccgtctgccgtcgccgccgccgcggccgccgtcttccaccaacaacatggcggacaacaaagccctggcctggcagcgctgcagagcggcggcggcgggggcctggagccctacgcggggccccagcagaactctcacgaccacggcttccccaaccaccagtacaactcctactaccccaaccgcagcgcctaccccccgcccgccccggcctacgcgctgagctccccgagaggtggcactccgggctccggcgcggcggcggctgccggctccaagccgcctccctcctccagcgcctccgcctcctcgtcgtcttcgtccttcgctcagcagcgcttcggggccatggggggaggcggcccctccgcggccggcgggggaactccccagcccaccgccacccccaccctcaaccaactgctcacgtcgcccagctcggcccggggctaccagggctaccccgggggcgactacagtggcgggccccaggacgggggcgccggcaagggcccggcggacatggcctcgcagtgttggggggctgcggcggcggcagctgcggcggcggccgcctcgggaggggcccaacaaaggagccaccacgcgcccatgagccccgggagcagcggcggcggggggcagccgctcgcccggacccctcagccatccagtccaatggatcagatgggcaagatgagacctcagccatatggcgggactaacccatactcgcagcaacagggacctccgtcaggaccgcagcaaggacatgggtacccagggcagccatacgggtcccagaccccgcagcggtacccgatgaccatgcagggccgggcgcagagtgccatgggcggcctctcttatacacagcagattcctccttatggacaacaaggccccagcgggtatggtcaacagggccagactccatattacaaccagcaaagtcctcaccctcagcagcagcagccaccctactcccagcaaccaccgtcccagacccctcatgcccaaccttcgtatcagcagcagccacagtctcaaccaccacagctccagtcctctcagcctccatactcccagcagccatcccagcctccacatcagcagtccccggctccatacccctcccagcagtcgacgacacagcagcacccccagagccagcccccctactcacagccacaggctcagtctccttaccagcagcagcaacctcagcagccagcaccctcgacgctctcccagcaggctgcgtatcctcagccccagtctcagcagtcccagcaaactgcctattcccagcagcgcttccctccaccgcaggagctatctcaagattcatttgggtctcaggcatcctcagccccctcaatgacctccagtaagggagggcaagaagatatgaacctgagccttcagtcaagaccctccagcttgcctgatctatctggttcaatagatgacctccccatggggacagaaggagctctgagtcctggagtgagcacatcagggatttccagcagccaaggagagcagagtaatccagctcagtctcctttctctcctcatacctcccctcacctgcctggcatccgaggcccttccccgtcccctgttggctctcccgccagtgttgctcagtctcgctcaggaccactctcgcctgctgcagtgccaggcaaccagatgccacctcggccacccagtggccagtcggacagcatcatgcatccttccatgaaccaatcaagcattgcccaagatcgaggttatatgcagaggaacccccagatgccccagtacagttccccccagcccggctcagccttatctccgcgtcagccttccggaggacagatacacacaggcatgggctcctaccagcagaactccatggggagctatggtccccaggggggtcagtatggcccacaaggtggctaccccaggcagccaaactataatgccttgcccaatgccaactaccccagtgcaggcatggctggaggcataaaccccatgggtgccggaggtcaaatgcatggacagcctggcatcccaccttatggcacactccctccagggaggatgagtcacgcctccatgggcaaccggccttatggccctaacatggccaatatgccacctcaggttgggtcagggatgtgtcccccaccagggggcatgaaccggaaaacccaagaaactgctgtcgccatgcatgttgctgccaactctatccaaaacaggccgccaggctaccccaatatgaatcaagggggcatgatgggaactggacctccttatggacaagggattaatagtatggctggcatgatcaaccctcagggacccccatattccatgggtggaaccatggccaacaattctgcagggatggcagccagcccagagatgatgggccttggggatgtaaagttaactccagccaccaaaatgaacaacaaggcagatgggacacccaagacagaatccaaatccaagaaatccagttcttctactacaaccaatgagaagatcaccaagttgtatgagctgggtggtgagcctgagaggaagatgtgggtggaccgttatctggccttcactgaggagaaggccatgggcatgacaaatctgcctgctgtgggtaggaaacctctggacctctatcgcctctatgtgtctgtgaaggagattggtggattgactcaggtcaacaagaacaaaaaatggcgggaacttgcaaccaacctcaatgtgggcacatcaagcagtgctgccagctccttgaaaaagcagtatatccagtgtctctatgcctttgaatgcaagattgaacggggagaagaccctcccccagacatctttgcagctgctgattccaagaagtcccagcccaagatccagcctccctctcctgcgggatcaggatctatgcaggggccccagactccccagtcaaccagcagttccatggcagaaggaggagacttaaagccaccaactccagcatccacaccacacagtcagatccccccattgccaggcatgagcaggagcaattcagttgggatccaggatgcctttaatgatggaagtgactccacattccagaagcggaattccatgactccaaaccctgggtatcagcccagtatgaatacctctgacatgatggggcgcatgtcctatgagccaaataaggatccttatggcagcatgaggaaagctccagggagtgatcccttcatgtcctcagggcagggccccaacggcgggatgggtgacccctacagtcgtgctgccggccctgggctaggaaatgtggcgatgggaccacgacagcactatccctatggaggtccttatgacagagtgaggacggagcctggaatagggcctgagggaaacatgagcactggggccccacagccgaatctcatgccttccaacccagactcggggatgtattctcctagccgctaccccccgcagcagcagcagcagcagcagcaacgacatgattcctatggcaatcagttctccacccaaggcaccccttctggcagccccttccccagccagcagactacaatgtatcaacagcaacagcagaattacaagcggccaatggatggcacatatggccctcctgccaagcggcacgaaggggagatgtacagcgtgccatacagcactgggcaggggcagcctcagcagcagcagttgcccccagcccagccccagcctgccagccagcaacaagctgcccagccttcccctcagcaagatgtatacaaccagtatggcaatgcctatcctgccactgccacagctgctactgagcgccgaccagcaggcggcccccagaaccaatttccattccagtttggccgagaccgtgtctctgcaccccctggcaccaatgcccagcaaaacatgccaccacaaatgatgggcggccccatacaggcatcagctgaggttgctcagcaaggcaccatgtggcaggggcgtaatgacatgacctataattatgccaacaggcagagcacgggctctgccccccagggccccgcctatcatggcgtgaaccgaacagatgaaatgctgcacacagatcagagggccaaccacgaaggctcgtggccttcccatggcacacgccagcccccatatggtccctctgcccctgtgccccccatgacaaggccccctccatctaactaccagcccccaccaagcatgcagaatcacattcctcaggtatccagccctgctcccctgccccggccaatggagaaccgcacctctcctagcaagtctccattcctgcactctgggatgaaaatgcagaaggcaggtcccccagtacctgcctcgcacatagcacctgcccctgtgcagccccccatgattcggcgggatatcaccttcccacctggctctgttgaagccacacagcctgtgttgaagcagaggaggcggctcacaatgaaagacattggaaccccggaggcatggcgggtaatgatgtccctcaagtctggtctcctggcagagagcacatgggcattagataccatcaacatcctgctgtatgatgacaacagcatcatgaccttcaacctcagtcagctcccagggttgctagagctccttgtagaatatttccgacgatgcctgattgagatctttggcattttaaaggagtatgaggtgggtgacccaggacagagaacgctactggatcctgggaggttcagcaaggtgtctagtccagctcccatggagggtggggaagaagaagaagaacttctaggtcctaaactagaagaggaagaagaagaggaagtagttgaaaatgatgaggagatagccttttcaggcaaggacaagccagcttcagagaatagtgaggagaagctgatcagtaagtttgacaagcttccagtaaagatcgtacagaagaatgatccatttgtggtggactgctcagataagcttgggcgtgtgcaggagtttgacagtggcctgctgcactggcggattggtgggggggacaccactgagcatatccagacccacttcgagagcaagacagagctgctgccttcccggcctcacgcaccctgcccaccagcccctcggaagcatgtgacaacagcagagggtacaccagggacaacagaccaggaggggcccccacctgatggacctccagaaaaacggatcacagccactatggatgacatgttgtctactcggtctagcaccttgaccgaggatggagctaagagttcagaggccatcaaggagagcagcaagtttccatttggcattagcccagcacagagccaccggaacatcaagatcctagaggacgaaccccacagtaaggatgagaccccactgtgtacccttctggactggcaggattctcttgccaagcgctgcgtctgtgtgtccaataccattcgaagcctgtcatttgtgccaggcaatgactttgagatgtccaaacacccagggctgctgctcatcctgggcaagctgatcctgctgcaccacaagcacccagaacggaagcaggcaccactaacttatgaaaaggaggaggaacaggaccaaggggtgagctgcaacaaagtggagtggtggtgggactgcttggagatgctccgggaaaacaccttggttacactcgccaacatctcggggcagttggacctatctccataccccgagagcatttgcctgcctgtcctggacggactcctacactgggcagtttgcccttcagctgaagcccaggaccccttttccaccctgggccccaatgccgtcctttccccgcagagactggtcttggaaaccctcagcaaactcagcatccaggacaacaatgtggacctgattctggccacaccccccttcagccgcctggagaagttgtatagcactatggtgcgcttcctcagtgaccgaaagaacccggtgtgccgggagatggctgtggtactgctggccaacctggctcagggggacagcctggcagctcgtgccattgcagtgcagaagggcagtatcggcaacctcctgggcttcctagaggacagccttgccgccacacagttccagcagagccaggccagcctcctccacatgcagaacccaccctttgagccaactagtgtggacatgatgcggcgggctgcccgcgcgctgcttgccttggccaaggtggacgagaaccactcagtttactctgtacgaatcacggctgttggacatctcggtatcaccgttgatgaactcattggtttcacaagtcatttgtgatgtactgtttttgattggccagtcatgacagccgtgggacacctcccccccccgtgtgtgtgtgcgtgtgtggagaacttagaaactgactgttgccctttatttatgcaaaaccacctcagaatccagtttaccctgtgctgtccagcttctcccttgggaaaaagtctctcctgtttctctctcctccttccacctcccctccctccatcacctcacgcctttctgttccttgtcctcaccttactcccctcaggaccctaccccaccctctttgaaaagacaaagctctgcctacatagaagactttttttattttaaccaaagttactgttgtttacagtgagtttggggaaaaaaaataaaataaaaatggctttcccagtccttgcatcaacgggatgccacatttcataactgtttttaatggtaaaaaaaaaaaaaaaaaatacaaaaaaaaattctgaaggacaaaaaaggtgactgctgaactgtgtgtggtttattgttgtacattcacaatcttgcaggagccaagaagttcgcagttgtgaacagaccctgttcactggagaggcctgtgcagtagagtgtagaccctttcatgtactgtactgtacacctgatactgtaaacatactgtaataataatgtctcacatggaaacagaaaacgctgggtcagcagcaagctgtagtttttaaaaatgtttttagttaaacgttgaggagaaaaaaaaaaaaggcttttcccccaaagtatcatgtgtgaacctacaacaccctgacctctttctctcctccttgattgtatgaataaccctgagatcacctcttagaactggttttaacctttagctgcagcggctacgctgccacgtgtgtatatatatgacgttgtacattgcacatacccttggatccccacagtttggtcctcctcccagctacccctttatagtatgacgagttaacaagttggtgacctgcacaaagcgagacacagctatttaatctcttgccagatatcgcccctcttggtgcgatgctgtacaggtctctgtaaaaagtccttgctgtctcagcagccaatcaacttatagtttatttttttctgggtttttgttttgttttgttttctttctaatcgaggtgtgaaaaagttctaggttcagttgaagttctgatgaagaaacacaattgagattttttcagtgataaaatctgcatatttgtatttcaacaatgtagctaaaacttgatgtaaattcctcctttttttccttttttggcttaatgaatatcatttattcagtatgaaatctttatactatatgttccacgtgttaagaataaatgtacattaaatcttggtaagacttt

SEQ ID NO: 51 - DNA, 8587 bp, Homo sapiens
cagaaagcggagagtcacagcggggccaggccctggggagcggagcctccaccgcccccctcattcccaggcaagggcttggggggaatgagccgggagagccgggtcccgagcctacagagccgggagcagctgagccgccggcgcctcggccgccgccgccgcctcctcctcctccgccgccgccagcccggagcctgagccggcggggcgggggggagaggagcgagcgcagcgcagcagcggagccccgcgaggcccgcccgggcgggtggggagggcagcccgggggactgggccccggggcggggtgggagggggggagaagacgaagacagggccgggtctctccgcggacgagacagcggggatcatggccgcgcaggtcgcccccgccgccgccagcagcctgggcaacccgccgccgccgccgccctcggagctgaagaaagccgagcagcagcagcgggaggaggcggggggcgaggcggcggcggcggcagcggccgagcgcggggaaatgaaggcagccgccgggcaggaaagcgagggccccgccgtggggccgccgcagccgctgggaaaggagctgcaggacggggccgagagcaatgggggtggcggcggcggcggagccggcagcggcggcgggcccggcgcggagccggacctgaagaactcgaacgggaacgcgggccctaggcccgccctgaacaataacctcacggagccgcccggcggcggcggtggcggcagcagcgatggggtgggggcgcctcctcactcagccgcggccgccttgccgcccccagcctacggcttcgggcaaccctacggccggagcccgtctgccgtcgccgccgccgcggccgccgtcttccaccaacaacatggcggacaacaaagccctggcctggcagcgctgcagagcggcggcggcgggggcctggagccctacgcggggccccagcagaactctcacgaccacggcttccccaaccaccagtacaactcctactaccccaaccgcagcgcctaccccccgcccgccccggcctacgcgctgagctccccgagaggtggcactccgggctccggcgcggcggcggctgccggctccaagccgcctccctcctccagcgcctccgcctcctcgtcgtcttcgtccttcgctcagcagcgcttcggggccatggggggaggcggcccctccgcggccggcgggggaactccccagcccaccgccacccccaccctcaaccaactgctcacgtcgcccagctcggcccggggctaccagggctaccccgggggcgactacagtggcgggccccaggacgggggcgccggcaagggcccggcggacatggcctcgcagtgttggggggctgcggcggcggcagctgcggcggcggccgcctcgggaggggcccaacaaaggagccaccacgcgcccatgagccccgggagcagcggcggcggggggcagccgctcgcccggacccctcagccatccagtccaatggatcagatgggcaagatgagacctcagccatatggcgggactaacccatactcgcagcaacagggacctccgtcaggaccgcagcaaggacatgggtacccagggcagccatacgggtcccagaccccgcagcggtacccgatgaccatgcagggccgggcgcagagtgccatgggcggcctctcttatacacagcagattcctccttatggacaacaaggccccagcgggtatggtcaacagggccagactccatattacaaccagcaaagtcctcaccctcagcagcagcagccaccctactcccagcaaccaccgtcccagacccctcatgcccaaccttcgtatcagcagcagccacagtctcaaccaccacagctccagtcctctcagcctccatactcccagcagccatcccagcctccacatcagcagtccccggctccatacccctcccagcagtcgacgacacagcagcacccccagagccagcccccctactcacagccacaggctcagtctccttaccagcagcagcaacctcagcagccagcaccctcgacgctctcccagcaggctgcgtatcctcagccccagtctcagcagtcccagcaaactgcctattcccagcagcgcttccctccaccgcaggagctatctcaagattcatttgggtctcaggcatcctcagccccctcaatgacctccagtaagggagggcaagaagatatgaacctgagccttcagtcaagaccctccagcttgcctgatctatctggttcaatagatgacctccccatggggacagaaggagctctgagtcctggagtgagcacatcagggatttccagcagccaaggagagcagagtaatccagctcagtctcctttctctcctcatacctcccctcacctgcctggcatccgaggcccttccccgtcccctgttggctctcccgccagtgttgctcagtctcgctcaggaccactctcgcctgctgcagtgccaggcaaccagatgccacctcggccacccagtggccagtcggacagcatcatgcatccttccatgaaccaatcaagcattgcccaagatcgaggttatatgcagaggaacccccagatgccccagtacagttccccccagcccggctcagccttatctccgcgtcagccttccggaggacagatacacacaggcatgggctcctaccagcagaactccatggggagctatggtccccaggggggtcagtatggcccacaaggtggctaccccaggcagccaaactataatgccttgcccaatgccaactaccccagtgcaggcatggctggaggcataaaccccatgggtgccggaggtcaaatgcatggacagcctggcatcccaccttatggcacactccctccagggaggatgagtcacgcctccatgggcaaccggccttatggccctaacatggccaatatgccacctcaggttgggtcagggatgtgtcccccaccagggggcatgaaccggaaaacccaagaaactgctgtcgccatgcatgttgctgccaactctatccaaaacaggccgccaggctaccccaatatgaatcaagggggcatgatgggaactggacctccttatggacaagggattaatagtatggctggcatgatcaaccctcagggacccccatattccatgggtggaaccatggccaacaattctgcagggatggcagccagcccagagatgatgggccttggggatgtaaagttaactccagccaccaaaatgaacaacaaggcagatgggacacccaagacagaatccaaatccaagaaatccagttcttctactacaaccaatgagaagatcaccaagttgtatgagctgggtggtgagcctgagaggaagatgtgggtggaccgttatctggccttcactgaggagaaggccatgggcatgacaaatctgcctgctgtgggtaggaaacctctggacctctatcgcctctatgtgtctgtgaaggagattggtggattgactcaggtcaacaagaacaaaaaatggcgggaacttgcaaccaacctcaatgtgggcacatcaagcagtgctgccagctccttgaaaaagcagtatatccagtgtctctatgcctttgaatgcaagattgaacggggagaagaccctcccccagacatctttgcagctgctgattccaagaagtcccagcccaagatccagcctccctctcctgcgggatcaggatctatgcaggggccccagactccccagtcaaccagcagttccatggcagaaggaggagacttaaagccaccaactccagcatccacaccacacagtcagatccccccattgccaggcatgagcaggagcaattcagttgggatccaggatgcctttaatgatggaagtgactccacattccagaagcggaattccatgactccaaaccctgggtatcagcccagtatgaatacctctgacatgatggggcgcatgtcctatgagccaaataaggatccttatggcagcatgaggaaagctccagggagtgatcccttcatgtcctcagggcagggccccaacggcgggatgggtgacccctacagtcgtgctgccggccctgggctaggaaatgtggcgatgggaccacgacagcactatccctatggaggtccttatgacagagtgaggacggagcctggaatagggcctgagggaaacatgagcactggggccccacagccgaatctcatgccttccaacccagactcggggatgtattctcctagccgctaccccccgcagcagcagcagcagcagcagcaacgacatgattcctatggcaatcagttctccacccaaggcaccccttctggcagccccttccccagccagcagactacaatgtatcaacagcaacagcagaattacaagcggccaatggatggcacatatggccctcctgccaagcggcacgaaggggagatgtacagcgtgccatacagcactgggcaggggcagcctcagcagcagcagttgcccccagcccagccccagcctgccagccagcaacaagctgcccagccttcccctcagcaagatgtatacaaccagtatggcaatgcctatcctgccactgccacagctgctactgagcgccgaccagcaggcggcccccagaaccaatttccattccagtttggccgagaccgtgtctctgcaccccctggcaccaatgcccagcaaaacatgccaccacaaatgatgggcggccccatacaggcatcagctgaggttgctcagcaaggcaccatgtggcaggggcgtaatgacatgacctataattatgccaacaggcagagcacgggctctgccccccagggccccgcctatcatggcgtgaaccgaacagatgaaatgctgcacacagatcagagggccaaccacgaaggctcgtggccttcccatggcacacgccagcccccatatggtccctctgcccctgtgccccccatgacaaggccccctccatctaactaccagcccccaccaagcatgcagaatcacattcctcaggtatccagccctgctcccctgccccggccaatggagaaccgcacctctcctagcaagtctccattcctgcactctgggatgaaaatgcagaaggcaggtcccccagtacctgcctcgcacatagcacctgcccctgtgcagccccccatgattcggcgggatatcaccttcccacctggctctgttgaagccacacagcctgtgttgaagcagaggaggcggctcacaatgaaagacattggaaccccggaggcatggcgggtaatgatgtccctcaagtctggtctcctggcagagagcacatgggcattagataccatcaacatcctgctgtatgatgacaacagcatcatgaccttcaacctcagtcagctcccagggttgctagagctccttgtagaatatttccgacgatgcctgattgagatctttggcattttaaaggagtatgaggtgggtgacccaggacagagaacgctactggatcctgggaggttcagcaaggtgtctagtccagctcccatggagggtggggaagaagaagaagaacttctaggtcctaaactagaagaggaagaagaagaggaagtagttgaaaatgatgaggagatagccttttcaggcaaggacaagccagcttcagagaatagtgaggagaagctgatcagtaagtttgacaagcttccagtaaagatcgtacagaagaatgatccatttgtggtggactgctcagataagcttgggcgtgtgcaggagtttgacagtggcctgctgcactggcggattggtgggggggacaccactgagcatatccagacccacttcgagagcaagacagagctgctgccttcccggcctcacgcaccctgcccaccagcccctcggaagcatgtgacaacagcagagggtacaccagggacaacagaccaggaggggcccccacctgatggacctccagaaaaacggatcacagccactatggatgacatgttgtctactcggtctagcaccttgaccgaggatggagctaagagttcagaggccatcaaggagagcagcaagtttccatttggcattagcccagcacagagccaccggaacatcaagatcctagaggacgaaccccacagtaaggatgagaccccactgtgtacccttctggactggcaggattctcttgccaagcgctgcgtctgtgtgtccaataccattcgaagcctgtcatttgtgccaggcaatgactttgagcaatgtccaaacacccagggctgctgctcatcctgggcaagctgatcctgctgcaccacaagcacccagaacggaagcaggcaccactaacttatgaaaaggaggaggaacaggaccaaggggtgagctgcaacaaagtggagtggtggtgggactgcttggagatgctccgggaaaacaccttggttacactcgccaacatctcggggcagttggacctatctccataccccgagagcatttgcctgcctgtcctggacggactcctacactgggcagtttgcccttcagctgaagcccaggaccccttttccaccctgggccccaatgccgtcctttccccgcagagactggtcttggaaaccctcagcaaactcagcatccaggacaacaatgtggacctgattctggccacaccccccttcagccgcctggagaagttgtatagcactatggtgcgcttcctcagtgaccgaaagaacccggtgtgccgggagatggctgtggtactgctggccaacctggctcagggggacagcctggcagctcgtgccattgcagtgcagaagggcagtatcggcaacctcctgggcttcctagaggacagccttgccgccacacagttccagcagagccaggccagcctcctccacatgcagaacccaccctttgagccaactagtgtggacatgatgcggcgggctgcccgcgcgctgcttgccttggccaaggtggacgagaaccactcagagtttactctgtacgaatcacggctgttggacatctcggtatcaccgttgatgaactcattggtttcacaagtcatttgtgatgtactgtttttgattggccagtcatgacagccgtgggacacctcccccccccgtgtgtgtgtgcgtgtgtggagaacttagaaactgactgttgccctttatttatgcaaaaccacctcagaatccagtttaccctgtgctgtccagcttctcccttgggaaaaagtctctcctgtttctctctcctccttccacctcccctccctccatcacctcacgcctttctgttccttgtcctcaccttactcccctcaggaccctaccccaccctctttgaaaagacaaagctctgcctacatagaagactttttttattttaaccaaagttactgttgtttacagtgagtttggggaaaaaaaataaaataaaaatggctttcccagtccttgcatcaacgggatgccacatttcataactgtttttaatggtaaaaaaaaaaaaaaaaaatacaaaaaaaaattctgaaggacaaaaaaggtgactgctgaactgtgtgtggtttattgttgtacattcacaatcttgcaggagccaagaagttcgcagttgtgaacagaccctgttcactggagaggcctgtgcagtagagtgtagaccctttcatgtactgtactgtacacctgatactgtaaacatactgtaataataatgtctcacatggaaacagaaaacgctgggtcagcagcaagctgtagtttttaaaaatgtttttagttaaacgttgaggagaaaaaaaaaaaaggcttttcccccaaagtatcatgtgtgaacctacaacaccctgacctctttctctcctccttgattgtatgaataaccctgagatcacctcttagaactggttttaacctttagctgcagcggctacgctgccacgtgtgtatatatatgacgttgtacattgcacatacccttggatccccacagtttggtcctcctcccagctacccctttatagtatgacgagttaacaagttggtgacctgcacaaagcgagacacagctatttaatctcttgccagatatcgcccctcttggtgcgatgctgtacaggtctctgtaaaaagtccttgctgtctcagcagccaatcaacttatagtttatttttttctgggtttttgttttgttttgttttctttctaatcgaggtgtgaaaaagttctaggttcagttgaagttctgatgaagaaacacaattgagattttttcagtgataaaatctgcatatttgtatttcaacaatgtagctaaaacttgatgtaaattcctcctttttttccttttttggcttaatgaatatcatttattcagtatgaaatctttatactatatgttccacgtgttaagaataaatgtacattaaatcttggtaagacttt

SEQ ID NO: 52 - DNA, 8584 bp, Homo sapiens
cagaaagcggagagtcacagcggggccaggccctggggagcggagcctccaccgcccccctcattcccaggcaagggcttggggggaatgagccgggagagccgggtcccgagcctacagagccgggagcagctgagccgccggcgcctcggccgccgccgccgcctcctcctcctccgccgccgccagcccggagcctgagccggcggggcgggggggagaggagcgagcgcagcgcagcagcggagccccgcgaggcccgcccgggcgggtggggagggcagcccgggggactgggccccggggcggggtgggagggggggagaagacgaagacagggccgggtctctccgcggacgagacagcggggatcatggccgcgcaggtcgcccccgccgccgccagcagcctgggcaacccgccgccgccgccgccctcggagctgaagaaagccgagcagcagcagcgggaggaggcggggggcgaggcggcggcggcggcagcggccgagcgcggggaaatgaaggcagccgccgggcaggaaagcgagggccccgccgtggggccgccgcagccgctgggaaaggagctgcaggacggggccgagagcaatgggggtggcggcggcggcggagccggcagcggcggcgggcccggcgcggagccggacctgaagaactcgaacgggaacgcgggccctaggcccgccctgaacaataacctcacggagccgcccggcggcggcggtggcggcagcagcgatggggtgggggcgcctcctcactcagccgcggccgccttgccgcccccagcctacggcttcgggcaaccctacggccggagcccgtctgccgtcgccgccgccgcggccgccgtcttccaccaacaacatggcggacaacaaagccctggcctggcagcgctgcagagcggcggcggcgggggcctggagccctacgcggggccccagcagaactctcacgaccacggcttccccaaccaccagtacaactcctactaccccaaccgcagcgcctaccccccgcccgccccggcctacgcgctgagctccccgagaggtggcactccgggctccggcgcggcggcggctgccggctccaagccgcctccctcctccagcgcctccgcctcctcgtcgtcttcgtccttcgctcagcagcgcttcggggccatggggggaggcggcccctccgcggccggcgggggaactccccagcccaccgccacccccaccctcaaccaactgctcacgtcgcccagctcggcccggggctaccagggctaccccgggggcgactacagtggcgggccccaggacgggggcgccggcaagggcccggcggacatggcctcgcagtgttggggggctgcggcggcggcagctgcggcggcggccgcctcgggaggggcccaacaaaggagccaccacgcgcccatgagccccgggagcagcggcggcggggggcagccgctcgcccggacccctcagccatccagtccaatggatcagatgggcaagatgagacctcagccatatggcgggactaacccatactcgcagcaacagggacctccgtcaggaccgcagcaaggacatgggtacccagggcagccatacgggtcccagaccccgcagcggtacccgatgaccatgcagggccgggcgcagagtgccatgggcggcctctcttatacacagcagattcctccttatggacaacaaggccccagcgggtatggtcaacagggccagactccatattacaaccagcaaagtcctcaccctcagcagcagcagccaccctactcccagcaaccaccgtcccagacccctcatgcccaaccttcgtatcagcagcagccacagtctcaaccaccacagctccagtcctctcagcctccatactcccagcagccatcccagcctccacatcagcagtccccggctccatacccctcccagcagtcgacgacacagcagcacccccagagccagcccccctactcacagccacaggctcagtctccttaccagcagcagcaacctcagcagccagcaccctcgacgctctcccagcaggctgcgtatcctcagccccagtctcagcagtcccagcaaactgcctattcccagcagcgcttccctccaccgcaggagctatctcaagattcatttgggtctcaggcatcctcagccccctcaatgacctccagtaagggagggcaagaagatatgaacctgagccttcagtcaagaccctccagcttgcctgatctatctggttcaatagatgacctccccatggggacagaaggagctctgagtcctggagtgagcacatcagggatttccagcagccaaggagagcagagtaatccagctcagtctcctttctctcctcatacctcccctcacctgcctggcatccgaggcccttccccgtcccctgttggctctcccgccagtgttgctcagtctcgctcaggaccactctcgcctgctgcagtgccaggcaaccagatgccacctcggccacccagtggccagtcggacagcatcatgcatccttccatgaaccaatcaagcattgcccaagatcgaggttatatgcagaggaacccccagatgccccagtacagttccccccagcccggctcagccttatctccgcgtcagccttccggaggacagatacacacaggcatgggctcctaccagcagaactccatggggagctatggtccccaggggggtcagtatggcccacaaggtggctaccccaggcagccaaactataatgccttgcccaatgccaactaccccagtgcaggcatggctggaggcataaaccccatgggtgccggaggtcaaatgcatggacagcctggcatcccaccttatggcacactccctccagggaggatgagtcacgcctccatgggcaaccggccttatggccctaacatggccaatatgccacctcaggttgggtcagggatgtgtcccccaccagggggcatgaaccggaaaacccaagaaactgctgtcgccatgcatgttgctgccaactctatccaaaacaggccgccaggctaccccaatatgaatcaagggggcatgatgggaactggacctccttatggacaagggattaatagtatggctggcatgatcaaccctcagggacccccatattccatgggtggaaccatggccaacaattctgcagggatggcagccagcccagagatgatgggccttggggatgtaaagttaactccagccaccaaaatgaacaacaaggcagatgggacacccaagacagaatccaaatccaagaaatccagttcttctactacaaccaatgagaagatcaccaagttgtatgagctgggtggtgagcctgagaggaagatgtgggtggaccgttatctggccttcactgaggagaaggccatgggcatgacaaatctgcctgctgtgggtaggaaacctctggacctctatcgcctctatgtgtctgtgaaggagattggtggattgactcaggtcaacaagaacaaaaaatggcgggaacttgcaaccaacctcaatgtgggcacatcaagcagtgctgccagctccttgaaaaagcagtatatccagtgtctctatgcctttgaatgcaagattgaacggggagaagaccctcccccagacatctttgcagctgctgattccaagaagtcccagcccaagatccagcctccctctcctgcgggatcaggatctatgcaggggccccagactccccagtcaaccagcagttccatggcagaaggaggagacttaaagccaccaactccagcatccacaccacacagtcagatccccccattgccaggcatgagcaggagcaattcagttgggatccaggatgcctttaatgatggaagtgactccacattccagaagcggaattccatgactccaaaccctgggtatcagcccagtatgaatacctctgacatgatggggcgcatgtcctatgagccaaataaggatccttatggcagcatgaggaaagctccagggagtgatcccttcatgtcctcagggcagggccccaacggcgggatgggtgacccctacagtcgtgctgccggccctgggctaggaaatgtggcgatgggaccacgacagcactatccctatggaggtccttatgacagagtgaggacggagcctggaatagggcctgagggaaacatgagcactggggccccacagccgaatctcatgccttccaacccagactcggggatgtattctcctagccgctaccccccgcagcagcagcagcagcagcagcaacgacatgattcctatggcaatcagttctccacccaaggcaccccttctggcagccccttccccagccagcagactacaatgtatcaacagcaacagcagaattacaagcggccaatggatggcacatatggccctcctgccaagcggcacgaaggggagatgtacagcgtgccatacagcactgggcaggggcagcctcagcagcagcagttgcccccagcccagccccagcctgccagccagcaacaagctgcccagccttcccctcagcaagatgtatacaaccagtatggcaatgcctatcctgccactgccacagctgctactgagcgccgaccagcaggcggcccccagaaccaatttccattccagtttggccgagaccgtgtctctgcaccccctggcaccaatgcccagcaaaacatgccaccacaaatgatgggcggccccatacaggcatcagctgaggttgctcagcaaggcaccatgtggcaggggcgtaatgacatgacctataattatgccaacaggcagagcacgggctctgccccccagggccccgcctatcatggcgtgaaccgaacagatgaaatgctgcacacagatcagagggccaaccacgaaggctcgtggccttccatggcacacgccagcccccatatggtccctctgcccctgtgccccccatgacaaggccccctccatctaactaccagcccccaccaagcatgcagaatcacattcctcaggtatccagccctgctcccctgccccggccaatggagaaccgcacctctcctagcaagtctccattcctgcactctgggatgaaaatgcagaaggcaggtcccccagtacctgcctcgcacatagcacctgcccctgtgcagccccccatgattcggcgggatatcaccttcccacctggctctgttgaagccacacagcctgtgttgaagcagaggaggcggctcacaatgaaagacattggaaccccggaggcatggcgggtaatgatgtccctcaagtctggtctcctggcagagagcacatgggcattagataccatcaacatcctgctgtatgatgacaacagcatcatgaccttcaacctcagtcagctcccagggttgctagagctccttgtagaatatttccgacgatgcctgattgagatctttggcattttaaaggagtatgaggtgggtgacccaggacagagaacgctactggatcctgggaggttcagcaaggtgtctagtccagctcccatggagggtggggaagaagaagaagaacttctaggtcctaaactagaagaggaagaagaagaggaagtagttgaaaatgatgaggagatagccttttcaggcaaggacaagccagcttcagagaatagtgaggagaagctgatcagtaagtttgacaagcttccagtaaagatcgtacagaagaatgatccatttgtggtggactgctcagataagcttgggcgtgtgcaggagtttgacagtggcctgctgcactggcggattggtgggggggacaccactgagcatatccagacccacttcgagagcaagacagagctgctgccttcccggcctcacgcaccctgcccaccagcccctcggaagcatgtgacaacagcagagggtacaccagggacaacagaccaggaggggcccccacctgatggacctccagaaaaacggatcacagccactatggatgacatgttgtctactcggtctagcaccttgaccgaggatggagctaagagttcagaggccatcaaggagagcagcaagtttccatttggcattagcccagcacagagccaccggaacatcaagatcctagaggacgaaccccacagtaaggatgagaccccactgtgtacccttctggactggcaggattctcttgccaagcgctgcgtctgtgtgtccaataccattcgaagcctgtcatttgtgccaggcaatgactttgagatgtccaaacacccagggctgctgctcatcctgggcaagctgatcctgctgcaccacaagcacccagaacggaagcaggcaccactaacttatgaaaaggaggaggaacaggaccaaggggtgagctgcaacaaagtggagtggtggtgggactgcttggagatgctccgggaaaacaccttggttacactcgccaacatctcggggcagttggacctatctccataccccgagagcatttgcctgcctgtcctggacggactcctacactgggcagtttgcccttcagctgaagcccaggaccccttttccaccctgggccccaatgccgtcctttccccgcagagactggtcttggaaaccctcagcaaactcagcatccaggacaacaatgtggacctgattctggccacaccccccttcagccgcctggagaagttgtatagcactatggtgcgcttcctcagtgaccgaaagaacccggtgtgccgggagatggctgtggtactgctggccaacctggctcagggggacagcctggcagctcgtgccattgcagtgcagaagggcagtatcggcaacctcctgggcttcctagaggacagccttgccgccacacagttccagcagagccaggccagcctcctccacatgcagaacccaccctttgagccaactagtgtggacatgatgcggcgggctgcccgcgcgctgcttgccttggccaaggtggacgagaaccactcagagtttactctgtacgaatcacggctgttggacatctcggtatcaccgttgatgaactcattggtttcacaagtcatttgtgatgtactgtttttgattggccagtcatgacagccgtgggacacctcccccccccgtgtgtgtgtgcgtgtgtggagaacttagaaactgactgttgccctttatttatgcaaaaccacctcagaatccagtttaccctgtgctgtccagcttctcccttgggaaaaagtctctcctgtttctctctcctccttccacctcccctccctccatcacctcacgcctttctgttccttgtcctcaccttactcccctcaggaccctaccccaccctctttgaaaagacaaagctctgcctacatagaagactttttttattttaaccaaagttactgttgtttacagtgagtttggggaaaaaaaataaaataaaaatggctttcccagtccttgcatcaacgggatgccacatttcataactgtttttaatggtaaaaaaaaaaaaaaaaaatacaaaaaaaaattctgaaggacaaaaaaggtgactgctgaactgtgtgtggtttattgttgtacattcacaatcttgcaggagccaagaagttcgcagttgtgaacagaccctgttcactggagaggcctgtgcagtagagtgtagaccctttcatgtactgtactgtacacctgatactgtaaacatactgtaataataatgtctcacatggaaacagaaaacgctgggtcagcagcaagctgtagtttttaaaaatgtttttagttaaacgttgaggagaaaaaaaaaaaaggcttttcccccaaagtatcatgtgtgaacctacaacaccctgacctctttctctcctccttgattgtatgaataaccctgagatcacctcttagaactggttttaacctttagctgcagcggctacgctgccacgtgtgtatatatatgacgttgtacattgcacatacccttggatccccacagtttggtcctcctcccagctacccctttatagtatgacgagttaacaagttggtgacctgcacaaagcgagacacagctatttaatctcttgccagatatcgcccctcttggtgcgatgctgtacaggtctctgtaaaaagtccttgctgtctcagcagccaatcaacttatagtttatttttttctgggtttttgttttgttttgttttctttctaatcgaggtgtgaaaaagttctaggttcagttgaagttctgatgaagaaacacaattgagattttttcagtgataaaatctgcatatttgtatttcaacaatgtagctaaaacttgatgtaaattcctcctttttttccttttttggcttaatgaatatcatttattcagtatgaaatctttatactatatgttccacgtgttaagaataaatgtacattaaatcttggtaagacttt

SEQ ID NO: 53 - DNA, 8583 bp, Homo sapiens
cagaaagcggagagtcacagcggggccaggccctggggagcggagcctccaccgcccccctcattcccaggcaagggcttggggggaatgagccgggagagccgggtcccgagcctacagagccgggagcagctgagccgccggcgcctcggccgccgccgccgcctcctcctcctccgccgccgccagcccggagcctgagccggcggggcgggggggagaggagcgagcgcagcgcagcagcggagccccgcgaggcccgcccgggcgggtggggagggcagcccgggggactgggccccggggcggggtgggagggggggagaagacgaagacagggccgggtctctccgcggacgagacagcggggatcatggccgcgcaggtcgcccccgccgccgccagcagcctgggcaacccgccgccgccgccgccctcggagctgaagaaagccgagcagcagcagcgggaggaggcggggggcgaggcggcggcggcggcagcggccgagcgcggggaaatgaaggcagccgccgggcaggaaagcgagggccccgccgtggggccgccgcagccgctgggaaaggagctgcaggacggggccgagagcaatgggggtggcggcggcggcggagccggcagcggcggcgggcccggcgcggagccggacctgaagaactcgaacgggaacgcgggccctaggcccgccctgaacaataacctcacggagccgcccggcggcggcggtggcggcagcagcgatggggtgggggcgcctcctcactcagccgcggccgccttgccgcccccagcctacggcttcgggcaaccctacggccggagcccgtctgccgtcgccgccgccgcggccgccgtcttccaccaacaacatggcggacaacaaagccctggcctggcagcgctgcagagcggcggcggcgggggcctggagccctacgcggggccccagcagaactctcacgaccacggcttccccaaccaccagtacaactcctactaccccaaccgcagcgcctaccccccgcccgccccggcctacgcgctgagctccccgagaggtggcactccgggctccggcgcggcggcggctgccggctccaagccgcctccctcctccagcgcctccgcctcctcgtcgtcttcgtccttcgctcagcagcgcttcggggccatggggggaggcggcccctccgcggccggcgggggaactccccagcccaccgccacccccaccctcaaccaactgctcacgtcgcccagctcggcccggggctaccagggctaccccgggggcgactacagtggcgggccccaggacgggggcgccggcaagggcccggcggacatggcctcgcagtgttggggggctgcggcggcggcagctgcggcggcggccgcctcgggaggggcccaacaaaggagccaccacgcgcccatgagccccgggagcagcggcggcggggggcagccgctcgcccggacccctcagccatccagtccaatggatcagatgggcaagatgagacctcagccatatggcgggactaacccatactcgcagcaacagggacctccgtcaggaccgcagcaaggacatgggtacccagggcagccatacgggtcccagaccccgcagcggtacccgatgaccatgcagggccgggcgcagagtgccatgggcggcctctcttatacacagcagattcctccttatggacaacaaggccccagcgggtatggtcaacagggccagactccatattacaaccagcaaagtcctcaccctcagcagcagcagccaccctactcccagcaaccaccgtcccagacccctcatgcccaaccttcgtatcagcagcagccacagtctcaaccaccacagctccagtcctctcagcctccatactcccagcagccatcccagcctccacatcagcagtccccggctccatacccctcccagcagtcgacgacacagcagcacccccagagccagcccccctactcacagccacaggctcagtctccttaccagcagcagcaacctcagcagccagcaccctcgacgctctcccagcaggctgcgtatcctcagccccagtctcagcagtcccagcaaactgcctattcccagcagcgcttccctccaccgcaggagctatctcaagattcatttgggtctcaggcatcctcagccccctcaatgacctccagtaagggagggcaagaagatatgaacctgagccttcagtcaagaccctccagcttgcctgatctatctggttcaatagatgacctccccatggggacagaaggagctctgagtcctggagtgagcacatcagggatttccagcagccaaggagagcagagtaatccagctcagtctcctttctctcctcatacctcccctcacctgcctggcatccgaggcccttccccgtcccctgttggctctcccgccagtgttgctcagtctcgctcaggaccactctcgcctgctgcagtgccaggcaaccagatgccacctcggccacccagtggccagtcggacagcatcatgcatccttccatgaaccaatcaagcattgcccaagatcgaggttatatgcagaggaacccccagatgccccagtacagttccccccagcccggctcagccttatctccgcgtcagccttccggaggacagatacacacaggcatgggctcctaccagcagaactccatggggagctatggtccccaggggggtcagtatggcccacaaggtggctaccccaggcagccaaactataatgccttgcccaatgccaactaccccagtgcaggcatggctggaggcataaaccccatgggtgccggaggtcaaatgcatggacagcctggcatcccaccttatggcacactccctccagggaggatgagtcacgcctccatgggcaaccggccttatggccctaacatggccaatatgccacctcaggttgggtcagggatgtgtcccccaccagggggcatgaaccggaaaacccaagaaactgctgtcgccatgcatgttgctgccaactctatccaaaacaggccgccaggctaccccaatatgaatcaagggggcatgatgggaactggacctccttatggacaagggattaatagtatggctggcatgatcaaccctcagggacccccatattccatgggtggaaccatggccaacaattctgcagggatggcagccagcccagagatgatgggccttggggatgtaaagttaactccagccaccaaaatgaacaacaaggcagatgggacacccaagacagaatccaaatccaagaaatccagttcttctactacaaccaatgagaagatcaccaagttgtatgagctgggtggtgagcctgagaggaagatgtgggtggaccgttatctggccttcactgaggagaaggccatgggcatgacaaatctgcctgctgtgggtaggaaacctctggacctctatcgcctctatgtgtctgtgaaggagattggtggattgactcaggtcaacaagaacaaaaaatggcgggaacttgcaaccaacctcaatgtgggcacatcaagcagtgctgccagctccttgaaaaagcagtatatccagtgtctctatgcctttgaatgcaagattgaacggggagaagaccctcccccagacatctttgcagctgctgattccaagaagtcccagcccaagatccagcctccctctcctgcgggatcaggatctatgcaggggccccagactccccagtcaaccagcagttccatggcagaaggaggagacttaaagccaccaactccagcatccacaccacacagtcagatccccccattgccaggcatgagcaggagcaattcagttgggatccaggatgcctttaatgatggaagtgactccacattccagaagcggaattccatgactccaaaccctgggtatcagcccagtatgaatacctctgacatgatggggcgcatgtcctatgagccaaataaggatccttatggcagcatgaggaaagctccagggagtgatcccttcatgtcctcagggcagggccccaacggcgggatgggtgacccctacagtcgtgctgccggccctgggctaggaaatgtggcgatgggaccacgacagcactatccctatggaggtccttatgacagagtgaggacggagcctggaatagggcctgagggaaacatgagcactggggccccacagccgaatctcatgccttccaacccagactcggggatgtattctcctagccgctaccccccgcagcagcagcagcagcagcagcaacgacatgattcctatggcaatcagttctccacccaaggcaccccttctggcagccccttccccagccagcagactacaatgtatcaacagcaacagcagaattacaagcggccaatggatggcacatatggccctcctgccaagcggcacgaaggggagatgtacagcgtgccatacagcactgggcaggggcagcctcagcagcagcagttgcccccagcccagccccagcctgccagccagcaacaagctgcccagccttcccctcagcaagatgtatacaaccagtatggcaatgcctatcctgccactgccacagctgctactgagcgccgaccagcaggcggcccccagaaccaatttccattccagtttggccgagaccgtgtctctgcaccccctggcaccaatgcccagcaaaacatgccaccacaaatgatgggcggccccatacaggcatcagctgaggttgctcagcaaggcaccatgtggcaggggcgtaatgacatgacctataattatgccaacaggcagagcacgggctctgccccccagggccccgcctatcatggcgtgaaccgaacagatgaaatgctgcacacagatcagagggccaaccacgaaggctcgtggccttcccatggcacacgccagcccccatatggtccctctgcccctgtgccccccatgacaaggccccctccatctaactaccagcccccaccaagcatgcagaatcacattcctcaggtatccagccctgctcccctgccccggccaatggagaaccgcacctctcctagcaagtctccattcctgcactctgggatgaaaatgcagaaggcaggtcccccagtacctgcctcgcacatagcacctgcccctgtgcagccccccatgattcggcgggatatcaccttcccacctggctctgttgaagccacacagcctgtgttgaagcagaggaggcggctcacaatgaaagacattggaaccccggaggcatggcgggtaatgatgtccctcaagtctggtctcctggcagagagcacatgggcattagataccatcaacatcctgctgtatgatgacaacagcatcatgaccttcaacctcagtcagctcccagggttgctagagctccttgtagaatatttccgacgatgcctgattgagatctttggcattttaaaggagtatgaggtgggtgacccaggacagagaacgctactggatcctgggaggttcagcaaggtgtctagtccagctcccatggagggtggggaagaagaagaagaacttctaggtcctaaactagaagaggaagaagaagaggaagtagttgaaaatgatgaggagatagccttttcaggcaaggacaagccagcttcagagaatagtgaggagaagctgatcagtaagtttgacaagcttccagtaaagatcgtacagaagaatgatccatttgtggtggactgctcagataagcttgggcgtgtgcaggagtttgacagtggcctgctgcactggcggattggtgggggggacaccactgagcatatccagacccacttcgagagcaagacagagctgctgccttcccggcctcacgcaccctgcccaccagcccctcggaagcatgtgacaacagcagagggtacaccagggacaacagaccaggaggggcccccacctgatggacctccagaaaaacggatcacagccactatggatgacatgttgtctactcggtctagcaccttgaccgaggatggagctaagagttcagaggccatcaaggagagcagcaagtttccatttggcattagcccagcacagagccaccggaacatcaagatcctagaggacgaaccccacagtaaggatgagaccccactgtgtacccttctggactggcaggattctcttgccaagcgctgcgtctgtgtgtccaataccattcgaagcctgtcatttgtgccaggcaatgactttgagatgtccaaacacccagggctgctgctcatcctgggcaagctgatcctgctgcaccacaagcacccagaacggaagcaggcaccactaacttatgaaaaggaggaggaacaggaccaaggggtgagctgcaacaaagtggagtggtggtgggactgcttggagatgctccgggaaaacaccttggttacactcgccaacatctcggggcagttggacctatctccataccccgagagcatttgcctgcctgtcctggacggactcctacactgggcagtttgcccttcagctgaagcccaggaccccttttccaccctgggccccaatgccgtcctttccccgcagagactggtcttggaaaccctcagcaaactcagcatccaggacaacaatgtggacctgattctggccacaccccccttcagccgcctggagaagttgtatagcactatggtgcgcttcctcagtgaccgaaagaacccggtgtgccgggagatggctgtggtactgctggccaacctggctcagggggacagcctggcagctcgtgccattgcagtgcagaagggcagtatcggcaacctcctgggcttcctagaggacagccttgccgccacacagttccagcagagccaggccagcctcctccacatgcagaacccactttgagccaactagtgtggacatgatgcggcgggctgcccgcgcgctgcttgccttggccaaggtggacgagaaccactcagagtttactctgtacgaatcacggctgttggacatctcggtatcaccgttgatgaactcattggtttcacaagtcatttgtgatgtactgtttttgattggccagtcatgacagccgtgggacacctcccccccccgtgtgtgtgtgcgtgtgtggagaacttagaaactgactgttgccctttatttatgcaaaaccacctcagaatccagtttaccctgtgctgtccagcttctcccttgggaaaaagtctctcctgtttctctctcctccttccacctcccctccctccatcacctcacgcctttctgttccttgtcctcaccttactcccctcaggaccctaccccaccctctttgaaaagacaaagctctgcctacatagaagactttttttattttaaccaaagttactgttgtttacagtgagtttggggaaaaaaaataaaataaaaatggctttcccagtccttgcatcaacgggatgccacatttcataactgtttttaatggtaaaaaaaaaaaaaaaaaatacaaaaaaaaattctgaaggacaaaaaaggtgactgctgaactgtgtgtggtttattgttgtacattcacaatcttgcaggagccaagaagttcgcagttgtgaacagaccctgttcactggagaggcctgtgcagtagagtgtagaccctttcatgtactgtactgtacacctgatactgtaaacatactgtaataataatgtctcacatggaaacagaaaacgctgggtcagcagcaagctgtagtttttaaaaatgtttttagttaaacgttgaggagaaaaaaaaaaaaggcttttcccccaaagtatcatgtgtgaacctacaacaccctgacctctttctctcctccttgattgtatgaataaccctgagatcacctcttagaactggttttaacctttagctgcagcggctacgctgccacgtgtgtatatatatgacgttgtacattgcacatacccttggatccccacagtttggtcctcctcccagctacccctttatagtatgacgagttaacaagttggtgacctgcacaaagcgagacacagctatttaatctcttgccagatatcgcccctcttggtgcgatgctgtacaggtctctgtaaaaagtccttgctgtctcagcagccaatcaacttatagtttatttttttctgggtttttgttttgttttgttttctttctaatcgaggtgtgaaaaagttctaggttcagttgaagttctgatgaagaaacacaattgagattttttcagtgataaaatctgcatatttgtatttcaacaatgtagctaaaacttgatgtaaattcctcctttttttccttttttggcttaatgaatatcatttattcagtatgaaatctttatactatatgttccacgtgttaagaataaatgtacattaaatcttggtaagacttt

SEQ ID NO: 54 - DNA, 8584 bp, Homo sapiens
cagaaagcggagagtcacagcggggccaggccctggggagcggagcctccaccgcccccctcattcccaggcaagggcttggggggaatgagccgggagagccgggtcccgagcctacagagccgggagcagctgagccgccggcgcctcggccgccgccgccgcctcctcctcctccgccgccgccagcccggagcctgagccggcggggcgggggggagaggagcgagcgcagcgcagcagcggagccccgcgaggcccgcccgggcgggtggggagggcagcccgggggactgggccccggggcggggtgggagggggggagaagacgaagacagggccgggtctctccgcggacgagacagcggggatcatggccgcgcaggtcgcccccgccgccgccagcagcctgggcaacccgccgccgccgccgccctcggagctgaagaaagccgagcagcagcagcgggaggaggcggggggcgaggcggcggcggcggcagcggccgagcgcggggaaatgaaggcagccgccgggcaggaaagcgagggccccgccgtggggccgccgcagccgctgggaaaggagctgcaggacggggccgagagcaatgggggtggcggcggcggcggagccggcagcggcggcgggcccggcgcggagccggacctgaagaactcgaacgggaacgcgggccctaggcccgccctgaacaataacctcacggagccgcccggcggcggcggtggcggcagcagcgatggggtgggggcgcctcctcactcagccgcggccgccttgccgcccccagcctacggcttcgggcaaccctacggccggagcccgtctgccgtcgccgccgccgcggccgccgtcttccaccaacaacatggcggacaacaaagccctggcctggcagcgctgcagagcggcggcggcgggggcctggagccctacgcggggccccagcagaactctcacgaccacggcttccccaaccaccagtacaactcctactaccccaaccgcagcgcctaccccccgcccgccccggcctacgcgctgagctccccgagaggtggcactccgggctccggcgcggcggcggctgccggctccaagccgcctccctcctccagcgcctccgcctcctcgtcgtcttcgtccttcgctcagcagcgcttcggggccatggggggaggcggcccctccgcggccggcgggggaactccccagcccaccgccacccccaccctcaaccaactgctcacgtcgcccagctcggcccggggctaccagggctaccccgggggcgactacagtggcgggccccaggacgggggcgccggcaagggcccggcggacatggcctcgcagtgttggggggctgcggcggcggcagctgcggcggcggccgcctcgggaggggcccaacaaaggagccaccacgcgcccatgagccccgggagcagcggcggcggggggcagccgctcgcccggacccctcagccatccagtccaatggatcagatgggcaagatgagacctcagccatatggcgggactaacccatactcgcagcaacagggacctccgtcaggaccgcagcaaggacatgggtacccagggcagccatacgggtcccagaccccgcagcggtacccgatgaccatgcagggccgggcgcagagtgccatgggcggcctctcttatacacagcagattcctccttatggacaacaaggccccagcgggtatggtcaacagggccagactccatattacaaccagcaaagtcctcaccctcagcagcagcagccaccctactcccagcaaccaccgtcccagacccctcatgcccaaccttcgtatcagcagcagccacagtctcaaccaccacagctccagtcctctcagcctccatactcccagcagccatcccagcctccacatcagcagtccccggctccatacccctcccagcagtcgacgacacagcagcacccccagagccagcccccctactcacagccacaggctcagtctccttaccagcagcagcaacctcagcagccagcaccctcgacgctctcccagcaggctgcgtatcctcagccccagtctcagcagtcccagcaaactgcctatcccagcagcgcttccctccaccgcaggagctatctcaagattcatttgggtctcaggcatcctcagccccctcaatgacctccagtaagggagggcaagaagatatgaacctgagccttcagtcaagaccctccagcttgcctgatctatctggttcaatagatgacctccccatggggacagaaggagctctgagtcctggagtgagcacatcagggatttccagcagccaaggagagcagagtaatccagctcagtctcctttctctcctcatacctcccctcacctgcctggcatccgaggcccttccccgtcccctgttggctctcccgccagtgttgctcagtctcgctcaggaccactctcgcctgctgcagtgccaggcaaccagatgccacctcggccacccagtggccagtcggacagcatcatgcatccttccatgaaccaatcaagcattgcccaagatcgaggttatatgcagaggaacccccagatgccccagtacagttccccccagcccggctcagccttatctccgcgtcagccttccggaggacagatacacacaggcatgggctcctaccagcagaactccatggggagctatggtccccaggggggtcagtatggcccacaaggtggctaccccaggcagccaaactataatgccttgcccaatgccaactaccccagtgcaggcatggctggaggcataaaccccatgggtgccggaggtcaaatgcatggacagcctggcatcccaccttatggcacactccctccagggaggatgagtcacgcctccatgggcaaccggccttatggccctaacatggccaatatgccacctcaggttgggtcagggatgtgtcccccaccagggggcatgaaccggaaaacccaagaaactgctgtcgccatgcatgttgctgccaactctatccaaaacaggccgccaggctaccccaatatgaatcaagggggcatgatgggaactggacctccttatggacaagggattaatagtatggctggcatgatcaaccctcagggacccccatattccatgggtggaaccatggccaacaattctgcagggatggcagccagcccagagatgatgggccttggggatgtaaagttaactccagccaccaaaatgaacaacaaggcagatgggacacccaagacagaatccaaatccaagaaatccagttcttctactacaaccaatgagaagatcaccaagttgtatgagctgggtggtgagcctgagaggaagatgtgggtggaccgttatctggccttcactgaggagaaggccatgggcatgacaaatctgcctgctgtgggtaggaaacctctggacctctatcgcctctatgtgtctgtgaaggagattggtggattgactcaggtcaacaagaacaaaaaatggcgggaacttgcaaccaacctcaatgtgggcacatcaagcagtgctgccagctccttgaaaaagcagtatatccagtgtctctatgcctttgaatgcaagattgaacggggagaagaccctcccccagacatctttgcagctgctgattccaagaagtcccagcccaagatccagcctccctctcctgcgggatcaggatctatgcaggggccccagactccccagtcaaccagcagttccatggcagaaggaggagacttaaagccaccaactccagcatccacaccacacagtcagatccccccattgccaggcatgagcaggagcaattcagttgggatccaggatgcctttaatgatggaagtgactccacattccagaagcggaattccatgactccaaaccctgggtatcagcccagtatgaatacctctgacatgatggggcgcatgtcctatgagccaaataaggatccttatggcagcatgaggaaagctccagggagtgatcccttcatgtcctcagggcagggccccaacggcgggatgggtgacccctacagtcgtgctgccggccctgggctaggaaatgtggcgatgggaccacgacagcactatccctatggaggtccttatgacagagtgaggacggagcctggaatagggcctgagggaaacatgagcactggggccccacagccgaatctcatgccttccaacccagactcggggatgtattctcctagccgctaccccccgcagcagcagcagcagcagcagcaacgacatgattcctatggcaatcagttctccacccaaggcaccccttctggcagccccttccccagccagcagactacaatgtatcaacagcaacagcagaattacaagcggccaatggatggcacatatggccctcctgccaagcggcacgaaggggagatgtacagcgtgccatacagcactgggcaggggcagcctcagcagcagcagttgcccccagcccagccccagcctgccagccagcaacaagctgcccagccttcccctcagcaagatgtatacaaccagtatggcaatgcctatcctgccactgccacagctgctactgagcgccgaccagcaggcggcccccagaaccaatttccattccagtttggccgagaccgtgtctctgcaccccctggcaccaatgcccagcaaaacatgccaccacaaatgatgggcggccccatacaggcatcagctgaggttgctcagcaaggcaccatgtggcaggggcgtaatgacatgacctataattatgccaacaggcagagcacgggctctgccccccagggccccgcctatcatggcgtgaaccgaacagatgaaatgctgcacacagatcagagggccaaccacgaaggctcgtggccttcccatggcacacgccagcccccatatggtccctctgcccctgtgccccccatgacaaggccccctccatctaactaccagcccccaccaagcatgcagaatcacattcctcaggtatccagccctgctcccctgccccggccaatggagaaccgcacctctcctagcaagtctccattcctgcactctgggatgaaaatgcagaaggcaggtcccccagtacctgcctcgcacatagcacctgcccctgtgcagccccccatgattcggcgggatatcaccttcccacctggctctgttgaagccacacagcctgtgttgaagcagaggaggcggctcacaatgaaagacattggaaccccggaggcatggcgggtaatgatgtccctcaagtctggtctcctggcagagagcacatgggcattagataccatcaacatcctgctgtatgatgacaacagcatcatgaccttcaacctcagtcagctcccagggttgctagagctccttgtagaatatttccgacgatgcctgattgagatctttggcattttaaaggagtatgaggtgggtgacccaggacagagaacgctactggatcctgggaggttcagcaaggtgtctagtccagctcccatggagggtggggaagaagaagaagaacttctaggtcctaaactagaagaggaagaagaagaggaagtagttgaaaatgatgaggagatagccttttcaggcaaggacaagccagcttcagagaatagtgaggagaagctgatcagtaagtttgacaagcttccagtaaagatcgtacagaagaatgatccatttgtggtggactgctcagataagcttgggcgtgtgcaggagtttgacagtggcctgctgcactggcggattggtgggggggacaccactgagcatatccagacccacttcgagagcaagacagagctgctgccttcccggcctcacgcaccctgcccaccagcccctcggaagcatgtgacaacagcagagggtacaccagggacaacagaccaggaggggcccccacctgatggacctccagaaaaacggatcacagccactatggatgacatgttgtctactcggtctagcaccttgaccgaggatggagctaagagttcagaggccatcaaggagagcagcaagtttccatttggcattagcccagcacagagccaccggaacatcaagatcctagaggacgaaccccacagtaaggatgagaccccactgtgtacccttctggactggcaggattctcttgccaagcgctgcgtctgtgtgtccaataccattcgaagcctgtcatttgtgccaggcaatgactttgagatgtccaaacacccagggctgctgctcatcctgggcaagctgatcctgctgcaccacaagcacccagaacggaagcaggcaccactaacttatgaaaaggaggaggaacaggaccaaggggtgagctgcaacaaagtggagtggtggtgggactgcttggagatgctccgggaaaacaccttggttacactcgccaacatctcggggcagttggacctatctccataccccgagagcatttgcctgcctgtcctggacggactcctacactgggcagtttgcccttcagctgaagcccaggaccccttttccaccctgggccccaatgccgtcctttccccgcagagactggtcttggaaaccctcagcaaactcagcatccaggacaacaatgtggacctgattctggccacaccccccttcagccgcctggagaagttgtatagcactatggtgcgcttcctcagtgaccgaaagaacccggtgtgccgggagatggctgtggtactgctggccaacctggctcagggggacagcctggcagctcgtgccattgcagtgcagaagggcagtatcggcaacctcctgggcttcctagaggacagccttgccgccacacagttccagcagagccaggccagcctcctccacatgcagaacccaccctttgagccaactagtgtggacatgatgcggcgggctgcccgcgcgctgcttgccttggccaaggtggacgagaaccactcagagtttactctgtacgaatcacggctgttggacatctcggtatcaccgttgatgaactcattggtttcacaagtcatttgtgatgtactgtttttgattggccagtcatgacagccgtgggacacctcccccccccgtgtgtgtgtgcgtgtgtggagaacttagaaactgactgttgccctttatttatgcaaaaccacctcagaatccagtttaccctgtgctgtccagcttctcccttgggaaaaagtctctcctgtttctctctcctccttccacctcccctccctccatcacctcacgcctttctgttccttgtcctcaccttactcccctcaggaccctaccccaccctctttgaaaagacaaagctctgcctacatagaagactttttttattttaaccaaagttactgttgtttacagtgagtttggggaaaaaaaataaaataaaaatggctttcccagtccttgcatcaacgggatgccacatttcataactgtttttaatggtaaaaaaaaaaaaaaaaaatacaaaaaaaaattctgaaggacaaaaaaggtgactgctgaactgtgtgtggtttattgttgtacattcacaatcttgcaggagccaagaagttcgcagttgtgaacagaccctgttcactggagaggcctgtgcagtagagtgtagaccctttcatgtactgtactgtacacctgatactgtaaacatactgtaataataatgtctcacatggaaacagaaaacgctgggtcagcagcaagctgtagtttttaaaaatgtttttagttaaacgttgaggagaaaaaaaaaaaaggcttttcccccaaagtatcatgtgtgaacctacaacaccctgacctctttctctcctccttgattgtatgaataaccctgagatcacctcttagaactggttttaacctttagctgcagcggctacgctgccacgtgtgtatatatatgacgttgtacattgcacatacccttggatccccacagtttggtcctcctcccagctacccctttatagtatgacgagttaacaagttggtgacctgcacaaagcgagacacagctatttaatctcttgccagatatcgcccctcttggtgcgatgctgtacaggtctctgtaaaaagtccttgctgtctcagcagccaatcaacttatagtttatttttttctgggtttttgttttgttttgttttctttctaatcgaggtgtgaaaaagttctaggttcagttgaagttctgatgaagaaacacaattgagattttttcagtgataaaatctgcatatttgtatttcaacaatgtagctaaaacttgatgtaaattcctcctttttttccttttttggcttaatgaatatcatttattcagtatgaaatctttatactatatgttccacgtgttaagaataaatgtacattaaatcttggtaagacttt

SEQ ID NO: 55 - DNA, 8586 bp, Homo sapiens
cagaaagcggagagtcacagcggggccaggccctggggagcggagcctccaccgcccccctcattcccaggcaagggcttggggggaatgagccgggagagccgggtcccgagcctacagagccgggagcagctgagccgccggcgcctcggccgccgccgccgcctcctcctcctccgccgccgccagcccggagcctgagccggcggggcgggggggagaggagcgagcgcagcgcagcagcggagccccgcgaggcccgcccgggcgggtggggagggcagcccgggggactgggccccggggcggggtgggagggggggagaagacgaagacagggccgggtctctccgcggacgagacagcggggatcatggccgcgcaggtcgcccccgccgccgccagcagcctgggcaacccgccgccgccgccgccctcggagctgaagaaagccgagcagcagcagcgggaggaggcggggggcgaggcggcggcggcggcagcggccgagcgcggggaaatgaaggcagccgccgggcaggaaagcgagggccccgccgtggggccgccgcagccgctgggaaaggagctgcaggacggggccgagagcaatgggggtggcggcggcggcggagccggcagcggcggcgggcccggcgcggagccggacctgaagaactcgaacgggaacgcgggccctaggcccgccctgaacaataacctcacggagccgcccggcggcggcggtggcggcagcagcgatggggtgggggcgcctcctcactcagccgcggccgccttgccgcccccagcctacggcttcgggcaaccctacggccggagcccgtctgccgtcgccgccgccgcggccgccgtcttccaccaacaacatggcggacaacaaagccctggcctggcagcgctgcagagcggcggcggcgggggcctggagccctacgcggggccccagcagaactctcacgaccacggcttccccaaccaccagtacaactcctactaccccaaccgcagcgcctaccccccgcccgccccggcctacgcgctgagctccccgagaggtggcactccgggctccggcgcggcggcggctgccggctccaagccgcctccctcctccagcgcctccgcctcctcgtcgtcttcgtccttcgctcagcagcgcttcggggccatggggggaggcggcccctccgcggccggcgggggaactccccagcccaccgccacccccaccctcaaccaactgctcacgtcgcccagctcggcccggggctaccagggctaccccgggggcgactacagtggcgggccccaggacgggggcgccggcaagggcccggcggacatggcctcgcagtgttggggggctgcggcggcggcagctgcggcggcggccgcctcgggaggggcccaacaaaggagccaccacgcgcccatgagccccgggagcagcggcggcggggggcagccgctcgcccggacccctcagccatccagtccaatggatcagatgggcaagatgagacctcagccatatggcgggactaacccatactcgcagcaacagggacctccgtcaggaccgcagcaaggacatgggtacccagggcagccatacgggtcccagaccccgcagcggtacccgatgaccatgcagggccgggcgcagagtgccatgggcggcctctcttatacacagcagattcctccttatggacaacaaggccccagcgggtatggtcaacagggccagactccatattacaaccagcaaagtcctcaccctcagcagcagcagccaccctactcccagcaaccaccgtcccagacccctcatgcccaaccttcgtatcagcagcagccacagtctcaaccaccacagctccagtcctctcagcctccatactcccagcagccatcccagcctccacatcagcagtccccggctccatacccctcccagcagtcgacgacacagcagcacccccagagccagcccccctactcacagccacaggctcagtctccttaccagcagcagcaacctcagcagccagcaccctcgacgctctcccagcaggctgcgtatcctcagccccagtctcagcagtcccagcaaactgcctattcccagcagcgcttccctccaccgcaggagctatctcaagattcatttgggtctcaggcatcctcagccccctcaatgacctccagtaagggagggcaagaagatatgaacctgagccttcagtcaagaccctccagcttgcctgatctatctggttcaatagatgacctccccatggggacagaaggagctctgagtcctggagtgagcacatcagggatttccagcagccaaggagagcagagtaatccagctcagtctcctttctctcctcatacctcccctcacctgcctggcatccgaggcccttccccgtcccctgttggctctcccgccagtgttgctcagtctcgctcaggaccactctcgcctgctgcagtgccaggcaaccagatgccacctcggccacccagtggccagtcggacagcatcatgcatccttccatgaaccaatcaagcattgcccaagatcgaggttatatgcagaggaacccccagatgccccagtacagttcccccccagcccggctcagccttatctccgcgtcagccttccggaggacagatacacacaggcatgggctcctaccagcagaactccatggggagctatggtccccaggggggtcagtatggcccacaaggtggctaccccaggcagccaaactataatgccttgcccaatgccaactaccccagtgcaggcatggctggaggcataaaccccatgggtgccggaggtcaaatgcatggacagcctggcatcccaccttatggcacactccctccagggaggatgagtcacgcctccatgggcaaccggccttatggccctaacatggccaatatgccacctcaggttgggtcagggatgtgtcccccaccagggggcatgaaccggaaaacccaagaaactgctgtcgccatgcatgttgctgccaactctatccaaaacaggccgccaggctaccccaatatgaatcaagggggcatgatgggaactggacctccttatggacaagggattaatagtatggctggcatgatcaaccctcagggacccccatattccatgggtggaaccatggccaacaattctgcagggatggcagccagcccagagatgatgggccttggggatgtaaagttaactccagccaccaaaatgaacaacaaggcagatgggacacccaagacagaatccaaatccaagaaatccagttcttctactacaaccaatgagaagatcaccaagttgtatgagctgggtggtgagcctgagaggaagatgtgggtggaccgttatctggccttcactgaggagaaggccatgggcatgacaaatctgcctgctgtgggtaggaaacctctggacctctatcgcctctatgtgtctgtgaaggagattggtggattgactcaggtcaacaagaacaaaaaatggcgggaacttgcaaccaacctcaatgtgggcacatcaagcagtgctgccagctccttgaaaaagcagtatatccagtgtctctatgcctttgaatgcaagattgaacggggagaagaccctcccccagacatctttgcagctgctgattccaagaagtcccagcccaagatccagcctccctctcctgcgggatcaggatctatgcaggggccccagactccccagtcaaccagcagttccatggcagaaggaggagacttaaagccaccaactccagcatccacaccacacagtcagatccccccattgccaggcatgagcaggagcaattcagttgggatccaggatgcctttaatgatggaagtgactccacattccagaagcggaattccatgactccaaaccctgggtatcagcccagtatgaatacctctgacatgatggggcgcatgtcctatgagccaaataaggatccttatggcagcatgaggaaagctccagggagtgatcccttcatgtcctcagggcagggccccaacggcgggatgggtgacccctacagtcgtgctgccggccctgggctaggaaatgtggcgatgggaccacgacagcactatccctatggaggtccttatgacagagtgaggacggagcctggaatagggcctgagggaaacatgagcactggggccccacagccgaatctcatgccttccaacccagactcggggatgtattctcctagccgctaccccccgcagcagcagcagcagcagcagcaacgacatgattcctatggcaatcagttctccacccaaggcaccccttctggcagccccttccccagccagcagactacaatgtatcaacagcaacagcagaattacaagcggccaatggatggcacatatggccctcctgccaagcggcacgaaggggagatgtacagcgtgccatacagcactgggcaggggcagcctcagcagcagcagttgcccccagcccagccccagcctgccagccagcaacaagctgcccagccttcccctcagcaagatgtatacaaccagtatggcaatgcctatcctgccactgccacagctgctactgagcgccgaccagcaggcggcccccagaaccaatttccattccagtttggccgagaccgtgtctctgcaccccctggcaccaatgcccagcaaaacatgccaccacaaatgatgggcggccccatacaggcatcagctgaggttgctcagcaaggcaccatgtggcaggggcgtaatgacatgacctataattatgccaacaggcagagcacgggctctgccccccagggccccgcctatcatggcgtgaaccgaacagatgaaatgctgcacacagatcagagggccaaccacgaaggctcgtggccttcccatggcacacgccagcccccatatggtccctctgcccctgtgccccccatgacaaggccccctccatctaactaccagcccccaccaagcatgcagaatcacattcctcaggtatccagccctgctcccctgccccggccaatggagaaccgcacctctcctagcaagtctccattcctgcactctgggatgaaaatgcagaaggcaggtcccccagtacctgcctcgcacatagcacctgcccctgtgcagccccccatgattcggcgggatatcaccttcccacctggctctgttgaagccacacagcctgtgttgaagcagaggaggcggctcacaatgaaagacattggaaccccggaggcatggcgggtaatgatgtccctcaagtctggtctcctggcagagagcacatgggcattagataccatcaacatcctgctgtatgatgacaacagcatcatgaccttcaacctcagtcagctcccagggttgctagagctccttgtagaatatttccgacgatgcctgattgagatctttggcattttaaaggagtatgaggtgggtgacccaggacagagaacgctactggatcctgggaggttcagcaaggtgtctagtccagctcccatggagggtggggaagaagaagaagaacttctaggtcctaaactagaagaggaagaagaagaggaagtagttgaaaatgatgaggagatagccttttcaggcaaggacaagccagcttcagagaatagtgaggagaagctgatcagtaagtttgacaagcttccagtaaagatcgtacagaagaatgatccatttgtggtggactgctcagataagcttgggcgtgtgcaggagtttgacagtggcctgctgcactggcggattggtgggggggacaccactgagcatatccagacccacttcgagagcaagacagagctgctgccttcccggcctcacgcaccctgcccaccagcccctcggaagcatgtgacaacagcagagggtacaccagggacaacagaccaggaggggcccccacctgatggacctccagaaaaacggatcacagccactatggatgacatgttgtctactcggtctagcaccttgaccgaggatggagctaagagttcagaggccatcaaggagagcagcaagtttccatttggcattagcccagcacagagccaccggaacatcaagatcctagaggacgaaccccacagtaaggatgagaccccactgtgtacccttctggactggcaggattctcttgccaagcgctgcgtctgtgtgtccaataccattcgaagcctgtcatttgtgccaggcaatgactttgagatgtccaaacacccagggctgctgctcatcctgggcaagctgatcctgctgcaccacaagcacccagaacggaagcaggcaccactaacttatgaaaaggaggaggaacaggaccaaggggtgagctgcaacaaagtggagtggtggtgggactgcttggagatgctccgggaaaacaccttggttacactcgccaacatctcggggcagttggacctatctccataccccgagagcatttgcctgcctgtcctggacggactcctacactgggcagtttgcccttcagctgaagcccaggaccccttttccaccctgggccccaatgccgtcctttccccgcagagactggtcttggaaaccctcagcaaactcagcatccaggacaacaatgtggacctgattctggccacaccccccttcagccgcctggagaagttgtatagcactatggtgcgcttcctcagtgaccgaaagaacccggtgtgccgggagatggctgtggtactgctggccaacctggctcagggggacagcctggcagctcgtgccattgcagtgcagaagggcagtatcggcaacctcctgggcttcctagaggacagccttgccgccacacagttccagcagagccaggccagcctcctccacatgcagaacccaccctttgagccaactagtgtggacatgatgcggcgggctgcccgcgcgctgcttgccttggccaaggtggacgagaaccactcagagtttactctgtacgaatcacggctgttggacatctcggtatcaccgttgatgaactcattggtttcacaagtcatttgtgatgtactgtttttgattggccagtcatgacagccgtgggacacctcccccccccgtgtgtgtgtgcgtgtgtggagaacttagaaactgactgttgccctttatttatgcaaaaccacctcagaatccagtttaccctgtgctgtccagcttctcccttgggaaaaagtctctcctgtttctctctcctccttccacctcccctccctccatcacctcacgcctttctgttccttgtcctcaccttactcccctcaggaccctaccccaccctctttgaaaagacaaagctctgcctacatagaagactttttttattttaaccaaagttactgttgtttacagtgagtttggggaaaaaaaataaaataaaaatggctttcccagtccttgcatcaacgggatgccacatttcataactgtttttaatggtaaaaaaaaaaaaaaaaaatacaaaaaaaaattctgaaggacaaaaaaggtgactgctgaactgtgtgtggtttattgttgtacattcacaatcttgcaggagccaagaagttcgcagttgtgaacagaccctgttcactggagaggcctgtgcagtagagtgtagaccctttcatgtactgtactgtacacctgatactgtaaacatactgtaataataatgtctcacatggaaacagaaaacgctgggtcagcagcaagctgtagtttttaaaaatgtttttagttaaacgttgaggagaaaaaaaaaaaaggcttttcccccaaagtatcatgtgtgaacctacaacaccctgacctctttctctcctccttgattgtatgaataaccctgagatcacctcttagaactggttttaacctttagctgcagcggctacgctgccacgtgtgtatatatatgacgttgtacattgcacatacccttggatccccacagtttggtcctcctcccagctacccctttatagtatgacgagttaacaagttggtgacctgcacaaagcgagacacagctatttaatctcttgccagatatcgcccctcttggtgcgatgctgtacaggtctctgtaaaaagtccttgctgtctcagcagccaatcaacttatagtttatttttttctgggtttttgttttgttttgttttctttctaatcgaggtgtgaaaaagttctaggttcagttgaagttctgatgaagaaacacaattgagattttttcagtgataaaatctgcatatttgtatttcaacaatgtagctaaaacttgatgtaaattcctcctttttttccttttttggcttaatgaatatcatttattcagtatgaaatctttatactatatgttccacgtgttaagaataaatgtacattaaatcttggtaagacttt

SEQ ID NO: 56 - DNA, 8585 bp, Homo sapiens
cagaaagcggagagtcacagcggggccaggccctggggagcggagcctccaccgcccccctcattcccaggcaagggcttggggggaatgagccgggagagccgggtcccgagcctacagagccgggagcagctgagccgccggcgcctcggccgccgccgccgcctcctcctcctccgccgccgccagcccggagcctgagccggcggggcgggggggagaggagcgagcgcagcgcagcagcggagccccgcgaggcccgcccgggcgggtggggagggcagcccgggggactgggccccggggcggggtgggagggggggagaagacgaagacagggccgggtctctccgcggacgagacagcggggatcatggccgcgcaggtcgcccccgccgccgccagcagcctgggcaacccgccgccgccgccgccctcggagctgaagaaagccgagcagcagcagcgggaggaggcggggggcgaggcggcggcggcggcagcggccgagcgcggggaaatgaaggcagccgccgggcaggaaagcgagggccccgccgtggggccgccgcagccgctgggaaaggagctgcaggacggggccgagagcaatgggggtggcggcggcggcggagccggcagcggcggcgggcccggcgcggagccggacctgaagaactcgaacgggaacgcgggccctaggcccgccctgaacaataacctcacggagccgcccggcggcggcggtggcggcagcagcgatggggtgggggcgcctcctcactcagccgcggccgccttgccgcccccagcctacggcttcgggcaaccctacggccggagcccgtctgccgtcgccgccgccgcggccgccgtcttccaccaacaacatggcggacaacaaagccctggcctggcagcgctgcagagcggcggcggcgggggcctggagccctacgcggggccccagcagaactctcacgaccacggcttccccaaccaccagtacaactcctactaccccaaccgcagcgcctaccccccgcccgccccggcctacgcgctgagctccccgagaggtggcactccgggctccggcgcggcggcggctgccggctccaagccgcctccctcctccagcgcctccgcctcctcgtcgtcttcgtccttcgctcagcagcgcttcggggccatggggggaggcggcccctccgcggccggcgggggaactccccagcccaccgccacccccaccctcaaccaactgctcacgtcgcccagctcggcccggggctaccagggctaccccgggggcgactacagtggcgggccccaggacgggggcgccggcaagggcccggcggacatggcctcgcagtgttggggggctgcggcggcggcagctgcggcggcggccgcctcgggaggggcccaacaaaggagccaccacgcgcccatgagccccgggagcagcggcggcggggggcagccgctcgcccggacccctcagccatccagtccaatggatcagatgggcaagatgagacctcagccatatggcgggactaacccatactcgcagcaacagggacctccgtcaggaccgcagcaaggacatgggtacccagggcagccatacgggtcccagaccccgcagcggtacccgatgaccatgcagggccgggcgcagagtgccatgggcggcctctcttatacacagcagattcctccttatggacaacaaggccccagcgggtatggtcaacagggccagactccatattacaaccagcaaagtcctcaccctcagcagcagcagccaccctactcccagcaaccaccgtcccagacccctcatgcccaaccttcgtatcagcagcagccacagtctcaaccaccacagctccagtcctctcagcctccatactcccagcagccatcccagcctccacatcagcagtccccggctccatacccctcccagcagtcgacgacacagcagcacccccagagccagcccccctactcacagccacaggctcagtctccttaccagcagcagcaacctcagcagccagcaccctcgacgctctcccagcaggctgcgtatcctcagccccagtctcagcagtcccagcaaactgcctattcccagcagcgcttccctccaccgcaggagctatctcaagattcatttgggtctcaggcatcctcagccccctcaatgacctccagtaagggagggcaagaagatatgaacctgagccttcagtcaagaccctccagcttgcctgatctatctggttcaatagatgacctccccatggggacagaaggagctctgagtcctggagtgagcacatcagggatttccagcagccaaggagagcagagtaatccagctcagtctcctttctctcctcatacctcccctcacctgcctggcatccgaggcccttccccgtcccctgttggctctcccgccagtgttgctcagtctcgctcaggaccactctcgcctgctgcagtgccaggcaaccagatgccacctcggccacccagtggccagtcggacagcatcatgcatccttccatgaaccaatcaagcattgcccaagatcgaggttatatgcagaggaacccccagatgccccagtacagttccccccagcccggctcagccttatctccgcgtcagccttccggaggacagatacacacaggcatgggctcctaccagcagaactccatggggagctatggtccccaggggggtcagtatggcccacaaggtggctaccccaggcagccaaactataatgccttgcccaatgccaactaccccagtgcaggcatggctggaggcataaaccccatgggtgccggaggtcaaatgcatggacagcctggcatcccaccttatggcacactccctccagggaggatgagtcacgcctccatgggcaaccggccttatggccctaacatggccaatatgccacctcaggttgggtcagggatgtgtcccccaccagggggcatgaaccggaaaacccaagaaactgctgtcgccatgcatgttgctgccaactctatccaaaacaggccgccaggctaccccaatatgaatcaagggggcatgatgggaactggacctccttatggacaagggattaatagtatggctggcatgatcaaccctcagggacccccatattccatgggtggaaccatggccaacaattctgcagggatggcagccagcccagagatgatgggccttggggatgtaaagttaactccagccaccaaaatgaacaacaaggcagatgggacacccaagacagaatccaaatccaagaaatccagttcttctactacaaccaatgagaagatcaccaagttgtatgagctgggtggtgagcctgagaggaagatgtgggtggaccgttatctggccttcactgaggagaaggccatgggcatgacaaatctgcctgctgtgggtaggaaacctctggacctctatcgcctctatgtgtctgtgaaggagattggtggattgactcaggtcaacaagaacaaaaaatggcgggaacttgcaaccaacctcaatgtgggcacatcaagcagtgctgccagctccttgaaaaagcagtatatccagtgtctctatgcctttgaatgcaagattgaacggggagaagaccctcccccagacatctttgcagctgctgattccaagaagtcccagcccaagatccagcctccctctcctgcgggatcaggatctatgcaggggccccagactccccagtcaaccagcagttccatggcagaaggaggagacttaaagccaccaactccagcatccacaccacacagtcagatccccccattgccaggcatgagcaggagcaattcagttgggatccaggatgcctttaatgatggaagtgactccacattccagaagcggaattccatgactccaaaccctgggtatcagcccagtatgaatacctctgacatgatggggcgcatgtcctatgagccaaataaggatccttatggcagcatgaggaaagctccagggagtgatcccttcatgtcctcagggcagggccccaacggcgggatgggtgacccctacagtcgtgctgccggccctgggctaggaaatgtggcgatgggaccacgacagcactatccctatggaggtccttatgacagagtgaggacggagcctggaatagggcctgagggaaacatgagcactggggccccacagccgaatctcatgccttccaacccagactcggggatgtattctcctagccgctaccccccgcagcagcagcagcagcagcagcaacgacatgattcctatggcaatcagttctccacccaaggcaccccttctggcagccccttccccagccagcagactacaatgtatcaacagcaacagcagaattacaagcggccaatggatggcacatatggccctcctgccaagcggcacgaaggggagatgtacagcgtgccatacagcactgggcaggggcagcctcagcagcagcagttgcccccagcccagccccagcctgccagccagcaacaagctgcccagccttcccctcagcaagatgtatacaaccagtatggcaatgcctatcctgccactgccacagctgctactgagcgccgaccagcaggcggcccccagaaccaatttccattccagtttggccgagaccgtgtctctgcaccccctggcaccaatgcccagcaaaacatgccaccacaaatgatgggcggccccatacaggcatcagctgaggttgctcagcaaggcaccatgtggcaggggcgtaatgacatgacctataattatgccaacaggcagagcacgggctctgccccccagggccccgcctatcatggcgtgaaccgaacagatgaaatgctgcacacagatcagagggccaaccacgaaggctcgtggccttcccatggcacacgccagcccccatatggtccctctgcccctgtgccccccatgacaaggccccctccatctaactaccagcccccaccaagcatgcagaatcacattcctcaggtatccagccctgctcccctgccccggccaatggagaaccgcacctctcctagcaagtctccattcctgcactctgggatgaaaatgcagaaggcaggtcccccagtacctgcctcgcacatagcacctgcccctgtgcagccccccatgattcggcgggatatcaccttcccacctggctctgttgaagccacacagcctgtgttgaagcagaggaggcggctcacaatgaaagacattagaaccccggaggcatggcgggtaatgatgtccctcaagtctggtctcctggcagagagcacatgggcattagataccatcaacatcctgctgtatgatgacaacagcatcatgaccttcaacctcagtcagctcccagggttgctagagctccttgtagaatatttccgacgatgcctgattgagatctttggcattttaaaggagtatgaggtgggtgacccaggacagagaacgctactggatcctgggaggttcagcaaggtgtctagtccagctcccatggagggtggggaagaagaagaagaacttctaggtcctaaactagaagaggaagaagaagaggaagtagttgaaaatgatgaggagatagccttttcaggcaaggacaagccagcttcagagaatagtgaggagaagctgatcagtaagtttgacaagcttccagtaaagatcgtacagaagaatgatccatttgtggtggactgctcagataagcttgggcgtgtgcaggagtttgacagtggcctgctgcactggcggattggtgggggggacaccactgagcatatccagacccacttcgagagcaagacagagctgctgccttcccggcctcacgcaccctgcccaccagcccctcggaagcatgtgacaacagcagagggtacaccagggacaacagaccaggaggggcccccacctgatggacctccagaaaaacggatcacagccactatggatgacatgttgtctactcggtctagcaccttgaccgaggatggagctaagagttcagaggccatcaaggagagcagcaagtttccatttggcattagcccagcacagagccaccggaacatcaagatcctagaggacgaaccccacagtaaggatgagaccccactgtgtacccttctggactggcaggattctcttgccaagcgctgcgtctgtgtgtccaataccattcgaagcctgtcatttgtgccaggcaatgactttgagatgtccaaacacccagggctgctgctcatcctgggcaagctgatcctgctgcaccacaagcacccagaacggaagcaggcaccactaacttatgaaaaggaggaggaacaggaccaaggggtgagctgcaacaaagtggagtggtggtgggactgcttggagatgctccgggaaaacaccttggttacactcgccaacatctcggggcagttggacctatctccataccccgagagcatttgcctgcctgtcctggacggactcctacactgggcagtttgcccttcagctgaagcccaggaccccttttccaccctgggccccaatgccgtcctttccccgcagagactggtcttggaaaccctcagcaaactcagcatccaggacaacaatgtggacctgattctggccacaccccccttcagccgcctggagaagttgtatagcactatggtgcgcttcctcagtgaccgaaagaacccggtgtgccgggagatggctgtggtactgctggccaacctggctcagggggacagcctggcagctcgtgccattgcagtgcagaagggcagtatcggcaacctcctgggcttcctagaggacagccttgccgccacacagttccagcagagccaggccagcctcctccacatgcagaacccaccctttgagccaactagtgtggacatgatgcggcgggctgcccgcgcgctgcttgccttggccaaggtggacgagaaccactcagagtttactctgtacgaatcacggctgttggacatctcggtatcaccgttgatgaactcattggtttcacaagtcatttgtgatgtactgtttttgattggccagtcatgacagccgtgggacacctcccccccccgtgtgtgtgtgcgtgtgtggagaacttagaaactgactgttgccctttatttatgcaaaaccacctcagaatccagtttaccctgtgctgtccagcttctcccttgggaaaaagtctctcctgtttctctctcctccttccacctcccctccctccatcacctcacgcctttctgttccttgtcctcaccttactcccctcaggaccctaccccaccctctttgaaaagacaaagctctgcctacatagaagactttttttattttaaccaaagttactgttgtttacagtgagtttggggaaaaaaaataaaataaaaatggctttcccagtccttgcatcaacgggatgccacatttcataactgtttttaatggtaaaaaaaaaaaaaaaaaatacaaaaaaaaattctgaaggacaaaaaaggtgactgctgaactgtgtgtggtttattgttgtacattcacaatcttgcaggagccaagaagttcgcagttgtgaacagaccctgttcactggagaggcctgtgcagtagagtgtagaccctttcatgtactgtactgtacacctgatactgtaaacatactgtaataataatgtctcacatggaaacagaaaacgctgggtcagcagcaagctgtagtttttaaaaatgtttttagttaaacgttgaggagaaaaaaaaaaaaggcttttcccccaaagtatcatgtgtgaacctacaacaccctgacctctttctctcctccttgattgtatgaataaccctgagatcacctcttagaactggttttaacctttagctgcagcggctacgctgccacgtgtgtatatatatgacgttgtacattgcacatacccttggatccccacagtttggtcctcctcccagctacccctttatagtatgacgagttaacaagttggtgacctgcacaaagcgagacacagctatttaatctcttgccagatatcgcccctcttggtgcgatgctgtacaggtctctgtaaaaagtccttgctgtctcagcagccaatcaacttatagtttatttttttctgggtttttgttttgttttgttttctttctaatcgaggtgtgaaaaagttctaggttcagttgaagttctgatgaagaaacacaattgagattttttcagtgataaaatctgcatatttgtatttcaacaatgtagctaaaacttgatgtaaattcctcctttttttccttttttggcttaatgaatatcatttattcagtatgaaatctttatactatatgttccacgtgttaagaataaatgtacattaaatcttggtaagacttt

SEQ ID NO: 57 - DNA, 8613 bp, Homo sapiens
cagaaagcggagagtcacagcggggccaggccctggggagcggagcctccaccgcccccctcattcccaggcaagggcttggggggaatgagccgggagagccgggtcccgagcctacagagccgggagcagctgagccgccggcgcctcggccgccgccgccgcctcctcctcctccgccgccgccagcccggagcctgagccggcggggcgggggggagaggagcgagcgcagcgcagcagcggagccccgcgaggcccgcccgggcgggtggggagggcagcccgggggactgggccccggggcggggtgggagggggggagaagacgaagacagggccgggtctctccgcggacgagacagcggggatcatggccgcgcaggggtcgccccccgcctccagcacctgggctcgcccccgccgccgccagcagcctgggcaacccgccgccgccgccgccctcggagctgaagaaagccgagcagcagcagcgggaggaggcggggggcgaggcggcggcggcggcagcggccgagcgcggggaaatgaaggcagccgccgggcaggaaagcgagggccccgccgtggggccgccgcagccgctgggaaaggagctgcaggacggggccgagagcaatgggggtggcggcggcggcggagccggcagcggcggcgggcccggcgcggagccggacctgaagaactcgaacgggaacgcgggccctaggcccgccctgaacaataacctcacggagccgcccggcggcggcggtggcggcagcagcgatggggtgggggcgcctcctcactcagccgcggccgccttgccgcccccagcctacggcttcgggcaaccctacggccggagcccgtctgccgtcgccgccgccgcggccgccgtcttccaccaacaacatggcggacaacaaagccctggcctggcagcgctgcagagcggcggcggcgggggcctggagccctacgcggggccccagcagaactctcacgaccacggcttccccaaccaccagtacaactcctactaccccaaccgcagcgcctaccccccgcccgccccggcctacgcgctgagctccccgagaggtggcactccgggctccggcgcggcggcggctgccggctccaagccgcctccctcctccagcgcctccgcctcctcgtcgtcttcgtccttcgctcagcagcgcttcggggccatggggggaggcggcccctccgcggccggcgggggaactccccagcccaccgccacccccaccctcaaccaactgctcacgtcgcccagctcggcccggggctaccagggctaccccgggggcgactacagtggcgggccccaggacgggggcgccggcaagggcccggcggacatggcctcgcagtgttggggggctgcggcggcggcagctgcggcggcggccgcctcgggaggggcccaacaaaggagccaccacgcgcccatgagccccgggagcagcggcggcggggggcagccgctcgcccggacccctcagccatccagtccaatggatcagatgggcaagatgagacctcagccatatggcgggactaacccatactcgcagcaacagggacctccgtcaggaccgcagcaaggacatgggtacccagggcagccatacgggtcccagaccccgcagcggtacccgatgaccatgcagggccgggcgcagagtgccatgggcggcctctcttatacacagcagattcctccttatggacaacaaggccccagcgggtatggtcaacagggccagactccatattacaaccagcaaagtcctcaccctcagcagcagcagccaccctactcccagcaaccaccgtcccagacccctcatgcccaaccttcgtatcagcagcagccacagtctcaaccaccacagctccagtcctctcagcctccatactcccagcagccatcccagcctccacatcagcagtccccggctccatacccctcccagcagtcgacgacacagcagcacccccagagccagcccccctactcacagccacaggctcagtctccttaccagcagcagcaacctcagcagccagcaccctcgacgctctcccagcaggctgcgtatcctcagccccagtctcagcagtcccagcaaactgcctattcccagcagcgcttccctccaccgcaggagctatctcaagattcatttgggtctcaggcatcctcagccccctcaatgacctccagtaagggagggcaagaagatatgaacctgagccttcagtcaagaccctccagcttgcctgatctatctggttcaatagatgacctccccatggggacagaaggagctctgagtcctggagtgagcacatcagggatttccagcagccaaggagagcagagtaatccagctcagtctcctttctctcctcatacctcccctcacctgcctggcatccgaggcccttccccgtcccctgttggctctcccgccagtgttgctcagtctcgctcaggaccactctcgcctgctgcagtgccaggcaaccagatgccacctcggccacccagtggccagtcggacagcatcatgcatccttccatgaaccaatcaagcattgcccaagatcgaggttatatgcagaggaacccccagatgccccagtacagttccccccagcccggctcagccttatctccgcgtcagccttccggaggacagatacacacaggcatgggctcctaccagcagaactccatggggagctatggtccccaggggggtcagtatggcccacaaggtggctaccccaggcagccaaactataatgccttgcccaatgccaactaccccagtgcaggcatggctggaggcataaaccccatgggtgccggaggtcaaatgcatggacagcctggcatcccaccttatggcacactccctccagggaggatgagtcacgcctccatgggcaaccggccttatggccctaacatggccaatatgccacctcaggttgggtcagggatgtgtcccccaccagggggcatgaaccggaaaacccaagaaactgctgtcgccatgcatgttgctgccaactctatccaaaacaggccgccaggctaccccaatatgaatcaagggggcatgatgggaactggacctccttatggacaagggattaatagtatggctggcatgatcaaccctcagggacccccatattccatgggtggaaccatggccaacaattctgcagggatggcagccagcccagagatgatgggccttggggatgtaaagttaactccagccaccaaaatgaacaacaaggcagatgggacacccaagacagaatccaaatccaagaaatccagttcttctactacaaccaatgagaagatcaccaagttgtatgagctgggtggtgagcctgagaggaagatgtgggtggaccgttatctggccttcactgaggagaaggccatgggcatgacaaatctgcctgctgtgggtaggaaacctctggacctctatcgcctctatgtgtctgtgaaggagattggtggattgactcaggtcaacaagaacaaaaaatggcgggaacttgcaaccaacctcaatgtgggcacatcaagcagtgctgccagctccttgaaaaagcagtatatccagtgtctctatgcctttgaatgcaagattgaacggggagaagaccctcccccagacatctttgcagctgctgattccaagaagtcccagcccaagatccagcctccctctcctgcgggatcaggatctatgcaggggccccagactccccagtcaaccagcagttccatggcagaaggaggagacttaaagccaccaactccagcatccacaccacacagtcagatccccccattgccaggcatgagcaggagcaattcagttgggatccaggatgcctttaatgatggaagtgactccacattccagaagcggaattccatgactccaaaccctgggtatcagcccagtatgaatacctctgacatgatggggcgcatgtcctatgagccaaataaggatccttatggcagcatgaggaaagctccagggagtgatcccttcatgtcctcagggcagggccccaacggcgggatgggtgacccctacagtcgtgctgccggccctgggctaggaaatgtggcgatgggaccacgacagcactatccctatggaggtccttatgacagagtgaggacggagcctggaatagggcctgagggaaacatgagcactggggccccacagccgaatctcatgccttccaacccagactcggggatgtattctcctagccgctaccccccgcagcagcagcagcagcagcagcaacgacatgattcctatggcaatcagttctccacccaaggcaccccttctggcagccccttccccagccagcagactacaatgtatcaacagcaacagcagaattacaagcggccaatggatggcacatatggccctcctgccaagcggcacgaaggggagatgtacagcgtgccatacagcactgggcaggggcagcctcagcagcagcagttgcccccagcccagccccagcctgccagccagcaacaagctgcccagccttcccctcagcaagatgtatacaaccagtatggcaatgcctatcctgccactgccacagctgctactgagcgccgaccagcaggcggcccccagaaccaatttccattccagtttggccgagaccgtgtctctgcaccccctggcaccaatgcccagcaaaacatgccaccacaaatgatgggcggccccatacaggcatcagctgaggttgctcagcaaggcaccatgtggcaggggcgtaatgacatgacctataattatgccaacaggcagagcacgggctctgccccccagggccccgcctatcatggcgtgaaccgaacagatgaaatgctgcacacagatcagagggccaaccacgaaggctcgtggccttcccatggcacacgccagcccccatatggtccctctgcccctgtgccccccatgacaaggccccctccatctaactaccagcccccaccaagcatgcagaatcacattcctcaggtatccagccctgctcccctgccccggccaatggagaaccgcacctctcctagcaagtctccattcctgcactctgggatgaaaatgcagaaggcaggtcccccagtacctgcctcgcacatagcacctgcccctgtgcagccccccatgattcggcgggatatcaccttcccacctggctctgttgaagccacacagcctgtgttgaagcagaggaggcggctcacaatgaaagacattggaaccccggaggcatggcgggtaatgatgtccctcaagtctggtctcctggcagagagcacatgggcattagataccatcaacatcctgctgtatgatgacaacagcatcatgaccttcaacctcagtcagctcccagggttgctagagctccttgtagaatatttccgacgatgcctgattgagatctttggcattttaaaggagtatgaggtgggtgacccaggacagagaacgctactggatcctgggaggttcagcaaggtgtctagtccagctcccatggagggtggggaagaagaagaagaacttctaggtcctaaactagaagaggaagaagaagaggaagtagttgaaaatgatgaggagatagccttttcaggcaaggacaagccagcttcagagaatagtgaggagaagctgatcagtaagtttgacaagcttccagtaaagatcgtacagaagaatgatccatttgtggtggactgctcagataagcttgggcgtgtgcaggagtttgacagtggcctgctgcactggcggattggtgggggggacaccactgagcatatccagacccacttcgagagcaagacagagctgctgccttcccggcctcacgcaccctgcccaccagcccctcggaagcatgtgacaacagcagagggtacaccagggacaacagaccaggaggggcccccacctgatggacctccagaaaaacggatcacagccactatggatgacatgttgtctactcggtctagcaccttgaccgaggatggagctaagagttcagaggccatcaaggagagcagcaagtttccatttggcattagcccagcacagagccaccggaacatcaagatcctagaggacgaaccccacagtaaggatgagaccccactgtgtacccttctggactggcaggattctcttgccaagcgctgcgtctgtgtgtccaataccattcgaagcctgtcatttgtgccaggcaatgactttgagatgtccaaacacccagggctgctgctcatcctgggcaagctgatcctgctgcaccacaagcacccagaacggaagcaggcaccactaacttatgaaaaggaggaggaacaggaccaaggggtgagctgcaacaaagtggagtggtggtgggactgcttggagatgctccgggaaaacaccttggttacactcgccaacatctcggggcagttggacctatctccataccccgagagcatttgcctgcctgtcctggacggactcctacactgggcagtttgcccttcagctgaagcccaggaccccttttccaccctgggccccaatgccgtcctttccccgcagagactggtcttggaaaccctcagcaaactcagcatccaggacaacaatgtggacctgattctggccacaccccccttcagccgcctggagaagttgtatagcactatggtgcgcttcctcagtgaccgaaagaacccggtgtgccgggagatggctgtggtactgctggccaacctggctcagggggacagcctggcagctcgtgccattgcagtgcagaagggcagtatcggcaacctcctgggcttcctagaggacagccttgccgccacacagttccagcagagccaggccagcctcctccacatgcagaacccaccctttgagccaactagtgtggacatgatgcggcgggctgcccgcgcgctgcttgccttggccaaggtggacgagaaccactcagagtttactctgtacgaatcacggctgttggacatctcggtatcaccgttgatgaactcattggtttcacaagtcatttgtgatgtactgtttttgattggccagtcatgacagccgtgggacacctcccccccccgtgtgtgtgtgcgtgtgtggagaacttagaaactgactgttgccctttatttatgcaaaaccacctcagaatccagtttaccctgtgctgtccagcttctcccttgggaaaaagtctctcctgtttctctctcctccttccacctcccctccctccatcacctcacgcctttctgttccttgtcctcaccttactcccctcaggaccctaccccaccctctttgaaaagacaaagctctgcctacatagaagactttttttattttaaccaaagttactgttgtttacagtgagtttggggaaaaaaaataaaataaaaatggctttcccagtccttgcatcaacgggatgccacatttcataactgtttttaatggtaaaaaaaaaaaaaaaaaatacaaaaaaaaattctgaaggacaaaaaaggtgactgctgaactgtgtgtggtttattgttgtacattcacaatcttgcaggagccaagaagttcgcagttgtgaacagaccctgttcactggagaggcctgtgcagtagagtgtagaccctttcatgtactgtactgtacacctgatactgtaaacatactgtaataataatgtctcacatggaaacagaaaacgctgggtcagcagcaagctgtagtttttaaaaatgtttttagttaaacgttgaggagaaaaaaaaaaaaggcttttcccccaaagtatcatgtgtgaacctacaacaccctgacctctttctctcctccttgattgtatgaataaccctgagatcacctcttagaactggttttaacctttagctgcagcggctacgctgccacgtgtgtatatatatgacgttgtacattgcacatacccttggatccccacagtttggtcctcctcccagctacccctttatagtatgacgagttaacaagttggtgacctgcacaaagcgagacacagctatttaatctcttgccagatatcgcccctcttggtgcgatgctgtacaggtctctgtaaaaagtccttgctgtctcagcagccaatcaacttatagtttatttttttctgggtttttgttttgttttgttttctttctaatcgaggtgtgaaaaagttctaggttcagttgaagttctgatgaagaaacacaattgagattttttcagtgataaaatctgcatatttgtatttcaacaatgtagctaaaacttgatgtaaattcctcctttttttccttttttggcttaatgaatatcatttattcagtatgaaatctttatactatatgttccacgtgttaagaataaatgtacattaaatcttggtaagacttt

SEQ ID NO: 58 - DNA, 8585 bp, Homo sapiens
cagaaagcggagagtcacagcggggccaggccctggggagcggagcctccaccgcccccctcattcccaggcaagggcttggggggaatgagccgggagagccgggtcccgagcctacagagccgggagcagctgagccgccggcgcctcggccgccgccgccgcctcctcctcctccgccgccgccagcccggagcctgagccggcggggcgggggggagaggagcgagcgcagcgcagcagcggagccccgcgaggcccgcccgggcgggtggggagggcagcccgggggactgggccccggggcggggtgggagggggggagaagacgaagacagggccgggtctctccgcggacgagacagcggggatcatggccgcgcaggtcgcccccgccgccgccagcagcctgggcaacccgccgccgccgccgccctcggagctgaagaaagccgagcagcagcagcgggaggaggcggggggcgaggcggcggcggcggcagcggccgagcgcggggaaatgaaggcagccgccgggcaggaaagcgagggccccgccgtggggccgccgcagccgctgggaaaggagctgcaggacggggccgagagcaatgggggtggcggcggcggcggagccggcagcggcggcgggcccggcgcggagccggacctgaagaactcgaacgggaacgcgggccctaggcccgccctgaacaataacctcacggagccgcccggcggcggcggtggcggcagcagcgatggggtgggggcgcctcctcactcagccgcggccgccttgccgcccccagcctacggcttcgggcaaccctacggccggagcccgtctgccgtcgccgccgccgcggccgccgtcttccaccaacaacatggcggacaacaaagccctggcctggcagcgctgcagagcggcggcggcgggggcctggagccctacgcggggccccagcagaactctcacgaccacggcttccccaaccaccagtacaactcctactaccccaaccgcagcgcctaccccccgcccgccccggcctacgcgctgagctccccgagaggtggcactccgggctccggcgcggcggcggctgccggctccaagccgcctccctcctccagcgcctccgcctcctcgtcgtcttcgtccttcgctcagcagcgcttcggggccatggggggaggcggcccctccgcggccggcgggggaactccccagcccaccgccacccccaccctcaaccaactgctcacgtcgcccagctcggcccggggctaccagggctaccccgggggcgactacagtggcgggccccaggacgggggcgccggcaagggcccggcggacatggcctcgcagtgttggggggctgcggcggcggcagctgcggcggcggccgcctcgggaggggcccaacaaaggagccaccacgcgcccatgagccccgggagcagcggcggcggggggcagccgctcgcccggacccctcagccatccagtccaatggatcagatgggcaagatgagacctcagccatatggcgggactaacccatactcgcagcaacagggacctccgtcaggaccgcagcaaggacatgggtacccagggcagccatacgggtcccagaccccgcagcggtacccgatgaccatgcagggccgggcgcagagtgccatgggcggcctctcttatacacagcagattcctccttatggacaacaaggccccagcgggtatggtcaacagggccagactccatattacaaccagcaaagtcctcaccctcagcagcagcagccaccctactcccagcaaccaccgtcccagacccctcatgcccaaccttcgtatcagcagcagccacagtctcaaccaccacagctccagtcctctcagcctccatactcccagcagccatcccagcctccacatcagcagtccccggctccatacccctcccagcagtcgacgacacagtagcacccccagagccagcccccctactcacagccacaggctcagtctccttaccagcagcagcaacctcagcagccagcaccctcgacgctctcccagcaggctgcgtatcctcagccccagtctcagcagtcccagcaaactgcctattcccagcagcgcttccctccaccgcaggagctatctcaagattcatttgggtctcaggcatcctcagccccctcaatgacctccagtaagggagggcaagaagatatgaacctgagccttcagtcaagaccctccagcttgcctgatctatctggttcaatagatgacctccccatggggacagaaggagctctgagtcctggagtgagcacatcagggatttccagcagccaaggagagcagagtaatccagctcagtctcctttctctcctcatacctcccctcacctgcctggcatccgaggcccttccccgtcccctgttggctctcccgccagtgttgctcagtctcgctcaggaccactctcgcctgctgcagtgccaggcaaccagatgccacctcggccacccagtggccagtcggacagcatcatgcatccttccatgaaccaatcaagcattgcccaagatcgaggttatatgcagaggaacccccagatgccccagtacagttccccccagcccggctcagccttatctccgcgtcagccttccggaggacagatacacacaggcatgggctcctaccagcagaactccatggggagctatggtccccaggggggtcagtatggcccacaaggtggctaccccaggcagccaaactataatgccttgcccaatgccaactaccccagtgcaggcatggctggaggcataaaccccatgggtgccggaggtcaaatgcatggacagcctggcatcccaccttatggcacactccctccagggaggatgagtcacgcctccatgggcaaccggccttatggccctaacatggccaatatgccacctcaggttgggtcagggatgtgtcccccaccagggggcatgaaccggaaaacccaagaaactgctgtcgccatgcatgttgctgccaactctatccaaaacaggccgccaggctaccccaatatgaatcaagggggcatgatgggaactggacctccttatggacaagggattaatagtatggctggcatgatcaaccctcagggacccccatattccatgggtggaaccatggccaacaattctgcagggatggcagccagcccagagatgatgggccttggggatgtaaagttaactccagccaccaaaatgaacaacaaggcagatgggacacccaagacagaatccaaatccaagaaatccagttcttctactacaaccaatgagaagatcaccaagttgtatgagctgggtggtgagcctgagaggaagatgtgggtggaccgttatctggccttcactgaggagaaggccatgggcatgacaaatctgcctgctgtgggtaggaaacctctggacctctatcgcctctatgtgtctgtgaaggagattggtggattgactcaggtcaacaagaacaaaaaatggcgggaacttgcaaccaacctcaatgtgggcacatcaagcagtgctgccagctccttgaaaaagcagtatatccagtgtctctatgcctttgaatgcaagattgaacggggagaagaccctcccccagacatctttgcagctgctgattccaagaagtcccagcccaagatccagcctccctctcctgcgggatcaggatctatgcaggggccccagactccccagtcaaccagcagttccatggcagaaggaggagacttaaagccaccaactccagcatccacaccacacagtcagatccccccattgccaggcatgagcaggagcaattcagttgggatccaggatgcctttaatgatggaagtgactccacattccagaagcggaattccatgactccaaaccctgggtatcagcccagtatgaatacctctgacatgatggggcgcatgtcctatgagccaaataaggatccttatggcagcatgaggaaagctccagggagtgatcccttcatgtcctcagggcagggccccaacggcgggatgggtgacccctacagtcgtgctgccggccctgggctaggaaatgtggcgatgggaccacgacagcactatccctatggaggtccttatgacagagtgaggacggagcctggaatagggcctgagggaaacatgagcactggggccccacagccgaatctcatgccttccaacccagactcggggatgtattctcctagccgctaccccccgcagcagcagcagcagcagcagcaacgacatgattcctatggcaatcagttctccacccaaggcaccccttctggcagccccttccccagccagcagactacaatgtatcaacagcaacagcagaattacaagcggccaatggatggcacatatggccctcctgccaagcggcacgaaggggagatgtacagcgtgccatacagcactgggcaggggcagcctcagcagcagcagttgcccccagcccagccccagcctgccagccagcaacaagctgcccagccttcccctcagcaagatgtatacaaccagtatggcaatgcctatcctgccactgccacagctgctactgagcgccgaccagcaggcggcccccagaaccaatttccattccagtttggccgagaccgtgtctctgcaccccctggcaccaatgcccagcaaaacatgccaccacaaatgatgggcggccccatacaggcatcagctgaggttgctcagcaaggcaccatgtggcaggggcgtaatgacatgacctataattatgccaacaggcagagcacgggctctgccccccagggccccgcctatcatggcgtgaaccgaacagatgaaatgctgcacacagatcagagggccaaccacgaaggctcgtggccttcccatggcacacgccagcccccatatggtccctctgcccctgtgccccccatgacaaggccccctccatctaactaccagcccccaccaagcatgcagaatcacattcctcaggtatccagccctgctcccctgccccggccaatggagaaccgcacctctcctagcaagtctccattcctgcactctgggatgaaaatgcagaaggcaggtcccccagtacctgcctcgcacatagcacctgcccctgtgcagccccccatgattcggcgggatatcaccttcccacctggctctgttgaagccacacagcctgtgttgaagcagaggaggcggctcacaatgaaagacattggaaccccggaggcatggcgggtaatgatgtccctcaagtctggtctcctggcagagagcacatgggcattagataccatcaacatcctgctgtatgatgacaacagcatcatgaccttcaacctcagtcagctcccagggttgctagagctccttgtagaatatttccgacgatgcctgattgagatctttggcattttaaaggagtatgaggtgggtgacccaggacagagaacgctactggatcctgggaggttcagcaaggtgtctagtccagctcccatggagggtggggaagaagaagaagaacttctaggtcctaaactagaagaggaagaagaagaggaagtagttgaaaatgatgaggagatagccttttcaggcaaggacaagccagcttcagagaatagtgaggagaagctgatcagtaagtttgacaagcttccagtaaagatcgtacagaagaatgatccatttgtggtggactgctcagataagcttgggcgtgtgcaggagtttgacagtggcctgctgcactggcggattggtgggggggacaccactgagcatatccagacccacttcgagagcaagacagagctgctgccttcccggcctcacgcaccctgcccaccagcccctcggaagcatgtgacaacagcagagggtacaccagggacaacagaccaggaggggcccccacctgatggacctccagaaaaacggatcacagccactatggatgacatgttgtctactcggtctagcaccttgaccgaggatggagctaagagttcagaggccatcaaggagagcagcaagtttccatttggcattagcccagcacagagccaccggaacatcaagatcctagaggacgaaccccacagtaaggatgagaccccactgtgtacccttctggactggcaggattctcttgccaagcgctgcgtctgtgtgtccaataccattcgaagcctgtcatttgtgccaggcaatgactttgagatgtccaaacacccagggctgctgctcatcctgggcaagctgatcctgctgcaccacaagcacccagaacggaagcaggcaccactaacttatgaaaaggaggaggaacaggaccaaggggtgagctgcaacaaagtggagtggtggtgggactgcttggagatgctccgggaaaacaccttggttacactcgccaacatctcggggcagttggacctatctccataccccgagagcatttgcctgcctgtcctggacggactcctacactgggcagtttgcccttcagctgaagcccaggaccccttttccaccctgggccccaatgccgtcctttccccgcagagactggtcttggaaaccctcagcaaactcagcatccaggacaacaatgtggacctgattctggccacaccccccttcagccgcctggagaagttgtatagcactatggtgcgcttcctcagtgaccgaaagaacccggtgtgccgggagatggctgtggtactgctggccaacctggctcagggggacagcctggcagctcgtgccattgcagtgcagaagggcagtatcggcaacctcctgggcttcctagaggacagccttgccgccacacagttccagcagagccaggccagcctcctccacatgcagaacccaccctttgagccaactagtgtggacatgatgcggcgggctgcccgcgcgctgcttgccttggccaaggtggacgagaaccactcagagtttactctgtacgaatcacggctgttggacatctcggtatcaccgttgatgaactcattggtttcacaagtcatttgtgatgtactgtttttgattggccagtcatgacagccgtgggacacctcccccccccgtgtgtgtgtgcgtgtgtggagaacttagaaactgactgttgccctttatttatgcaaaaccacctcagaatccagtttaccctgtgctgtccagcttctcccttgggaaaaagtctctcctgtttctctctcctccttccacctcccctccctccatcacctcacgcctttctgttccttgtcctcaccttactcccctcaggaccctaccccaccctctttgaaaagacaaagctctgcctacatagaagactttttttattttaaccaaagttactgttgtttacagtgagtttggggaaaaaaaataaaataaaaatggctttcccagtccttgcatcaacgggatgccacatttcataactgtttttaatggtaaaaaaaaaaaaaaaaaatacaaaaaaaaattctgaaggacaaaaaaggtgactgctgaactgtgtgtggtttattgttgtacattcacaatcttgcaggagccaagaagttcgcagttgtgaacagaccctgttcactggagaggcctgtgcagtagagtgtagaccctttcatgtactgtactgtacacctgatactgtaaacatactgtaataataatgtctcacatggaaacagaaaacgctgggtcagcagcaagctgtagtttttaaaaatgtttttagttaaacgttgaggagaaaaaaaaaaaaggcttttcccccaaagtatcatgtgtgaacctacaacaccctgacctctttctctcctccttgattgtatgaataaccctgagatcacctcttagaactggttttaacctttagctgcagcggctacgctgccacgtgtgtatatatatgacgttgtacattgcacatacccttggatccccacagtttggtcctcctcccagctacccctttatagtatgacgagttaacaagttggtgacctgcacaaagcgagacacagctatttaatctcttgccagatatcgcccctcttggtgcgatgctgtacaggtctctgtaaaaagtccttgctgtctcagcagccaatcaacttatagtttatttttttctgggtttttgttttgttttgttttctttctaatcgaggtgtgaaaaagttctaggttcagttgaagttctgatgaagaaacacaattgagattttttcagtgataaaatctgcatatttgtatttcaacaatgtagctaaaacttgatgtaaattcctcctttttttccttttttggcttaatgaatatcatttattcagtatgaaatctttatactatatgttccacgtgttaagaataaatgtacattaaatcttggtaagacttt

SEQ ID NO: 59 - DNA, 8585 bp, Homo sapiens
cagaaagcggagagtcacagcggggccaggccctggggagcggagcctccaccgcccccctcattcccaggcaagggcttggggggaatgagccgggagagccgggtcccgagcctacagagccgggagcagctgagccgccggcgcctcggccgccgccgccgcctcctcctcctccgccgccgccagcccggagcctgagccggcggggcgggggggagaggagcgagcgcagcgcagcagcggagccccgcgaggcccgcccgggcgggtggggagggcagcccgggggactgggccccggggcggggtgggagggggggagaagacgaagacagggccgggtctctccgcggacgagacagcggggatcatggccgcgcaggtcgcccccgccgccgccagcagcctgggcaacccgccgccgccgccgccctcggagctgaagaaagccgagcagcagcagcgggaggaggcggggggcgaggcggcggcggcggcagcggccgagcgcggggaaatgaaggcagccgccgggcaggaaagcgagggccccgccgtggggccgccgcagccgctgggaaaggagctgcaggacggggccgagagcaatgggggtggcggcggcggcggagccggcagcggcggcgggcccggcgcggagccggacctgaagaactcgaacgggaacgcgggccctaggcccgccctgaacaataacctcacggagccgcccggcggcggcggtggcggcagcagcgatggggtgggggcgcctcctcactcagccgcggccgccttgccgcccccagcctacggcttcgggcaaccctacggccggagcccgtctgccgtcgccgccgccgcggccgccgtcttccaccaacaacatggcggacaacaaagccctggcctggcagcgctgcagagcggcggcggcgggggcctggagccctacgcggggccccagcagaactctcacgaccacggcttccccaaccaccagtacaactcctactaccccaaccgcagcgcctaccccccgcccgccccggcctacgcgctgagctccccgagaggtggcactccgggctccggcgcggcggcggctgccggctccaagccgcctccctcctccagcgcctccgcctcctcgtcgtcttcgtccttcgctcagcagcgcttcggggccatggggggaggcggcccctccgcggccggcgggggaactccccagcccaccgccacccccaccctcaaccaactgctcacgtcgcccagctcggcccggggctaccagggctaccccgggggcgactacagtggcgggccccaggacgggggcgccggcaagggcccggcggacatggcctcgcagtgttggggggctgcggcggcggcagctgcggcggcggccgcctcgggaggggcccaacaaaggagccaccacgcgcccatgagccccgggagcagcggcggcggggggcagccgctcgcccggacccctcagccatccagtccaatggatcagatgggcaagatgagacctcagccatatggcgggactaacccatactcgcagcaacagggacctccgtcaggaccgcagcaaggacatgggtacccagggcagccatacgggtcccagaccccgcagcggtacccgatgaccatgcagggccgggcgcagagtgccatgggcggcctctcttatacacagcagattcctccttatggacaacaaggccccagcgggtatggtcaacagggccagactccatattacaaccagcaaagtcctcaccctcagcagcagcagccaccctactcccagcaaccaccgtcccagacccctcatgcccaaccttcgtatcagcagcagccacagtctcaaccaccacagctccagtcctctcagcctccatactcccagcagccatcccagcctccacatcagcagtccccggctccatacccctcccagcagtcgacgacacagcagcacccccagagccagcccccctactcacagccacaggctcagtctccttaccagcagcagcaacctcagcagccagcaccctcgacgctctcccagcaggctgcgtatcctcagccccagtctcagcagtcccagcaaactgcctattcccagcagcgcttccctccaccgcaggagctatctcaagattcatttgggtctcaggcatcctcagccccctcaatgacctccagtaagggagggcaagaagatatgaacctgagccttcagtcaagaccctccagcttgcctgatctatctggttcaatagatgacctccccatggggacagaaggagctctgagtcctggagtgagcacatcagggatttccagcagccaaggagagcagagtaatccagctcagtctcctttctctcctcatacctcccctcacctgcctggcatccgaggcccttccccgtcccctgttggctctcccgccagtgttgctcagtctcgctcaggaccactctcgcctgctgcagtgccaggcaaccagatgccacctcggccacccagtggccagtcggacagcatcatgcatccttccatgaaccaatcaagcattgcccaagatcgaggttatatgcagaggaacccccagatgccccagtacagttccccccagcccggctcagccttatctccgcgtcagccttccggaggacagatacacacaggcatgggctcctaccagcagaactccatggggagctatggtccccaggggggtcagtatggcccacaaggtggctaccccaggcagccaaactataatgccttgcccaatgccaactaccccagtgcaggcatggctggaggcataaaccccatgggtgccggaggtcaaatgcatggacagcctggcatcccaccttatggcacactccctccagggaggatgagtcacgcctccatgggcaaccggccttatggccctaacatggccaatatgccacctcaggttgggtcagggatgtgtcccccaccagggggcatgaaccggaaaacccaagaaactgctgtcgccatgcatgttgctgccaactctatccaaaacaggccgccaggctaccccaatatgaatcaagggggcatgatgggaactggacctccttatggacaagggattaatagtatggctggcatgatcaaccctcagggacccccatattccatgggtggaaccatggccaacaattctgcagggatggcagccagcccagagatgatgggccttggggatgtaaagttaactccagccaccaaaatgaacaacaaggcagatgggacacccaagacagaatccaaatccaagaaatccagttcttctactacaaccaatgagaagatcaccaagttgtatgagctgggtggtgagcctgagaggaagatgtgggtggaccgttatctggccttcactgaggagaaggccatgggcatgacaaatctgcctgctgtgggtaggaaacctctggacctctatcgcctctatgtgtctgtgaaggagattggtggattgactcaggtcaacaagaacaaaaaatggcgggaacttgcaaccaacctcaatgtgggcacatcaagcagtgctgccagctccttgaaaaagcagtatatccagtgtctctatgcctttgaatgcaagattgaacggggagaagaccctcccccagacatctttgcagctgctgattccaagaagtcccagcccaagatccagcctccctctcctgcgggatcaggatctatgcaggggccccagactccccagtcaaccagcagttccatggcagaaggaggagacttaaagccaccaactccagcatccacaccacacagtcagatccccccattgccaggcatgagcaggagcaattcagttgggatccaggatgcctttaatgatggaagtgactccacattccagaagcggaattccatgactccaaaccctgggtatcagcccagtatgaatacctctgacatgatggggcgcatgtcctatgagccaaataaggatccttatggcagcatgaggaaagctccagggagtgatcccttcatgtcctcagggcagggccccaacggcgggatgggtgacccctacagtcgtgctgccggccctgggctaggaaatgtggcgatgggaccacgacagcactatccctatggaggtccttatgacagagtgaggacggagcctggaatagggcctgagggaaacatgagcactggggccccacagccgaatctcatgccttccaacccagactcggggatgtattctcctagccgctaccccccgcagcagcagcagcagcagcagcaacgacatgattcctatggcaatcagttctccacccaaggcaccccttctggcagccccttccccagccagcagactacaatgtatcaacagcaacagcagaattacaagcggccaatggatggcacatatggccctcctgccaagcggcacgaaggggagatgtacagcgtgccatacagcactgggcaggggcagcctcagcagcagcagttgcccccagcccagccccagcctgccagccagcaacaagctgcccagccttcccctcagcaagatgtatacaaccagtatggcaatgcctatcctgccactgccacagctgctactgagcgccgaccagcaggcggcccccagaaccaatttccattccagtttggccgagaccgtgtctctgcaccccctggcaccaatgcccagcaaaacatgccaccacaaatgatgggcggccccatacaggcatcagctgaggttgctcagcaaggcaccatgtggcaggggcgtaatgacatgacctataattatgccaacaggcagagcacgggctctgccccccagggccccgcctatcatggcgtgaaccgaacagatgaaatgctgcacacagatcagagggccaaccacgaaggctcgtggccttcccatggcacacgccagcccccatatggtccctctgcccctgtgccccccatgacaaggccccctccatctaactaccagcccccaccaagcatgcagaatcacattcctcaggtatccagccctgctcccctgccccggccaatggagaaccgcacctctcctagcaagtctccattcctgcactctgggatgaaaatgcagaaggcaggtcccccagtacctgcctcgcacatagcacctgcccctgtgcagccccccatgattcggcgggatatcaccttcccacctggctctgttgaagccacacagcctgtgttgaagcagaggaggcggctcacaatgaaagacattggaaccccggaggcatggcgggtaatgatgtccctcaagtctggtctcctggcagagagcacatgggcattagataccatcaacatcctgctgtatgatgacaacagcatcatgaccttcaacctcagtcagctcccagggttgctagagctccttgtagaatatttccgacgatgcctgattgagatctttggcattttaaaggagtatgaggtgggtgacccaggacagagaacgctactggatcctgggaggttcagcaaggtgtctagtccagctcccatggagggtggggaagaagaagaagaacttctaggtcctaaactagaagaggaagaagaagaggaagtagttgaaaatgatgaggagatagccttttcaggcaaggacaagccagcttcagagaatagtgaggagaagctgatcagtaagtttgacaagcttccagtaaagatcgtacagaagaatgatccatttgtggtggactgctcagataagcttgggcgtgtgcaggagtttgacagtggcctgctgcactggcggattggtgggggggacaccactgagcatatccagacccacttcgagagcaagacagagctgctgccttcccggcctcacgcaccctgcccaccagcccctcggaagcatgtgacaacagcagagggtacaccagggacaacagaccaggaggggcccccacctgatggacctccagaaaaacggatcacagccactatggatgacatgttgtctactcggtctagcaccttgaccgaggatggagctaagagttcagaggccatcaaggagagcagcaagtttccatttggcattagcccagcacagagccaccggaacatcaagatcctagaggacgaaccccacagtaaggatgagaccccactgtgtacccttctggactggcaggattctcttgccaagcgctgcgtctgtgtgtccaataccattcgaagcctgtcatttgtgccaggcaatgactttgagatgtccaaacacccagggctgctgctcatcctgggcaagctgatcctgctgcaccacaagcacccagaacggaagcaggcaccactaacttatgaaaaggaggaggaacaggaccaaggggtgagctgcaacaaagtggagtggtggtgggactgcttggagatgctccgggaaaacaccttggttacactcgccgacatctcggggcagttggacctatctccataccccgagagcatttgcctgcctgtcctggacggactcctacactgggcagtttgcccttcagctgaagcccaggaccccttttccaccctgggccccaatgccgtcctttccccgcagagactggtcttggaaaccctcagcaaactcagcatccaggacaacaatgtggacctgattctggccacaccccccttcagccgcctggagaagttgtatagcactatggtgcgcttcctcagtgaccgaaagaacccggtgtgccgggagatggctgtggtactgctggccaacctggctcagggggacagcctggcagctcgtgccattgcagtgcagaagggcagtatcggcaacctcctgggcttcctagaggacagccttgccgccacacagttccagcagagccaggccagcctcctccacatgcagaacccaccctttgagccaactagtgtggacatgatgcggcgggctgcccgcgcgctgcttgccttggccaaggtggacgagaaccactcagagtttactctgtacgaatcacggctgttggacatctcggtatcaccgttgatgaactcattggtttcacaagtcatttgtgatgtactgtttttgattggccagtcatgacagccgtgggacacctcccccccccgtgtgtgtgtgcgtgtgtggagaacttagaaactgactgttgccctttatttatgcaaaaccacctcagaatccagtttaccctgtgctgtccagcttctcccttgggaaaaagtctctcctgtttctctctcctccttccacctcccctccctccatcacctcacgcctttctgttccttgtcctcaccttactcccctcaggaccctaccccaccctctttgaaaagacaaagctctgcctacatagaagactttttttattttaaccaaagttactgttgtttacagtgagtttggggaaaaaaaataaaataaaaatggctttcccagtccttgcatcaacgggatgccacatttcataactgtttttaatggtaaaaaaaaaaaaaaaaaatacaaaaaaaaattctgaaggacaaaaaaggtgactgctgaactgtgtgtggtttattgttgtacattcacaatcttgcaggagccaagaagttcgcagttgtgaacagaccctgttcactggagaggcctgtgcagtagagtgtagaccctttcatgtactgtactgtacacctgatactgtaaacatactgtaataataatgtctcacatggaaacagaaaacgctgggtcagcagcaagctgtagtttttaaaaatgtttttagttaaacgttgaggagaaaaaaaaaaaaggcttttcccccaaagtatcatgtgtgaacctacaacaccctgacctctttctctcctccttgattgtatgaataaccctgagatcacctcttagaactggttttaacctttagctgcagcggctacgctgccacgtgtgtatatatatgacgttgtacattgcacatacccttggatccccacagtttggtcctcctcccagctacccctttatagtatgacgagttaacaagttggtgacctgcacaaagcgagacacagctatttaatctcttgccagatatcgcccctcttggtgcgatgctgtacaggtctctgtaaaaagtccttgctgtctcagcagccaatcaacttatagtttatttttttctgggtttttgttttgttttgttttctttctaatcgaggtgtgaaaaagttctaggttcagttgaagttctgatgaagaaacacaattgagattttttcagtgataaaatctgcatatttgtatttcaacaatgtagctaaaacttgatgtaaattcctcctttttttccttttttggcttaatgaatatcatttattcagtatgaaatctttatactatatgttccacgtgttaagaataaatgtacattaaatcttggtaagacttt

SEQ ID NO: 60 - DNA, 8584 bp, Homo sapiens
cagaaagcggagagtcacagcggggccaggccctggggagcggagcctccaccgcccccctcattcccaggcaagggcttggggggaatgagccgggagagccgggtcccgagcctacagagccgggagcagctgagccgccggcgcctcggccgccgccgccgcctcctcctcctccgccgccgccagcccggagcctgagccggcggggcgggggggagaggagcgagcgcagcgcagcagcggagccccgcgaggcccgcccgggcgggtggggagggcagcccgggggactgggccccggggcggggtgggagggggggagaagacgaagacagggccgggtctctccgcggacgagacagcggggatcatggccgcgcaggtcgcccccgccgccgccagcagcctgggcaacccgccgccgccgccgccctcggagctgaagaaagccgagcagcagcagcgggaggaggcggggggcgaggcggcggcggcggcagcggccgagcgcggggaaatgaaggcagccgccgggcaggaaagcgagggccccgccgtggggccgccgcagccgctgggaaaggagctgcaggacggggccgagagcaatgggggtggcggcggcggcggagccggcagcggcggcgggcccggcgcggagccggacctgaagaactcgaacgggaacgcgggccctaggcccgccctgaacaataacctcacggagccgcccggcggcggcggtggcggcagcagcgatggggtgggggcgcctcctcactcagccgcggccgccttgccgcccccagcctacggcttcgggcaaccctacggccggagcccgtctgccgtcgccgccgccgcggccgccgtcttccaccaacaacatggcggacaacaaagccctggcctggcagcgctgcagagcggcggcggcgggggcctggagccctacgcggggccccagcagaactctcacgaccacggcttccccaaccaccagtacaactcctactaccccaaccgcagcgcctaccccccgcccgccccggcctacgcgctgagctccccgagaggtggcactccgggctccggcgcggcggcggctgccggctccaagccgcctccctcctccagcgcctccgcctcctcgtcgtcttcgtccttcgctcagcagcgcttcggggccatggggggaggcggcccctccgcggccggcgggggaactccccagcccaccgccacccccaccctcaaccaactgctcacgtcgcccagctcggcccggggctaccagggctaccccgggggcgactacagtggcgggccccaggacgggggcgccggcaagggcccggcggacatggcctcgcagtgttggggggctgcggcggcggcagctgcggcggcggccgcctcgggaggggcccaacaaaggagccaccacgcgcccatgagccccgggagcagcggcggcggggggcagccgctcgcccggacccctcagccatccagtccaatggatcagatgggcaagatgagacctcagccatatggcgggactaacccatactcgcagcaacagggacctccgtcaggaccgcagcaaggacatgggtacccagggcagccatacgggtcccagaccccgcagcggtacccgatgaccatgcagggccgggcgcagagtgccatgggcggcctctcttatacacagcagattcctccttatggacaacaaggccccagcgggtatggtcaacagggcagactccatattacaaccagcaaagtcctcaccctcagcagcagcagccaccctactcccagcaaccaccgtcccagacccctcatgcccaaccttcgtatcagcagcagccacagtctcaaccaccacagctccagtcctctcagcctccatactcccagcagccatcccagcctccacatcagcagtccccggctccatacccctcccagcagtcgacgacacagcagcacccccagagccagcccccctactcacagccacaggctcagtctccttaccagcagcagcaacctcagcagccagcaccctcgacgctctcccagcaggctgcgtatcctcagccccagtctcagcagtcccagcaaactgcctattcccagcagcgcttccctccaccgcaggagctatctcaagattcatttgggtctcaggcatcctcagccccctcaatgacctccagtaagggagggcaagaagatatgaacctgagccttcagtcaagaccctccagcttgcctgatctatctggttcaatagatgacctccccatggggacagaaggagctctgagtcctggagtgagcacatcagggatttccagcagccaaggagagcagagtaatccagctcagtctcctttctctcctcatacctcccctcacctgcctggcatccgaggcccttccccgtcccctgttggctctcccgccagtgttgctcagtctcgctcaggaccactctcgcctgctgcagtgccaggcaaccagatgccacctcggccacccagtggccagtcggacagcatcatgcatccttccatgaaccaatcaagcattgcccaagatcgaggttatatgcagaggaacccccagatgccccagtacagttccccccagcccggctcagccttatctccgcgtcagccttccggaggacagatacacacaggcatgggctcctaccagcagaactccatggggagctatggtccccaggggggtcagtatggcccacaaggtggctaccccaggcagccaaactataatgccttgcccaatgccaactaccccagtgcaggcatggctggaggcataaaccccatgggtgccggaggtcaaatgcatggacagcctggcatcccaccttatggcacactccctccagggaggatgagtcacgcctccatgggcaaccggccttatggccctaacatggccaatatgccacctcaggttgggtcagggatgtgtcccccaccagggggcatgaaccggaaaacccaagaaactgctgtcgccatgcatgttgctgccaactctatccaaaacaggccgccaggctaccccaatatgaatcaagggggcatgatgggaactggacctccttatggacaagggattaatagtatggctggcatgatcaaccctcagggacccccatattccatgggtggaaccatggccaacaattctgcagggatggcagccagcccagagatgatgggccttggggatgtaaagttaactccagccaccaaaatgaacaacaaggcagatgggacacccaagacagaatccaaatccaagaaatccagttcttctactacaaccaatgagaagatcaccaagttgtatgagctgggtggtgagcctgagaggaagatgtgggtggaccgttatctggccttcactgaggagaaggccatgggcatgacaaatctgcctgctgtgggtaggaaacctctggacctctatcgcctctatgtgtctgtgaaggagattggtggattgactcaggtcaacaagaacaaaaaatggcgggaacttgcaaccaacctcaatgtgggcacatcaagcagtgctgccagctccttgaaaaagcagtatatccagtgtctctatgcctttgaatgcaagattgaacggggagaagaccctcccccagacatctttgcagctgctgattccaagaagtcccagcccaagatccagcctccctctcctgcgggatcaggatctatgcaggggccccagactccccagtcaaccagcagttccatggcagaaggaggagacttaaagccaccaactccagcatccacaccacacagtcagatccccccattgccaggcatgagcaggagcaattcagttgggatccaggatgcctttaatgatggaagtgactccacattccagaagcggaattccatgactccaaaccctgggtatcagcccagtatgaatacctctgacatgatggggcgcatgtcctatgagccaaataaggatccttatggcagcatgaggaaagctccagggagtgatcccttcatgtcctcagggcagggccccaacggcgggatgggtgacccctacagtcgtgctgccggccctgggctaggaaatgtggcgatgggaccacgacagcactatccctatggaggtccttatgacagagtgaggacggagcctggaatagggcctgagggaaacatgagcactggggccccacagccgaatctcatgccttccaacccagactcggggatgtattctcctagccgctaccccccgcagcagcagcagcagcagcagcaacgacatgattcctatggcaatcagttctccacccaaggcaccccttctggcagccccttccccagccagcagactacaatgtatcaacagcaacagcagaattacaagcggccaatggatggcacatatggccctcctgccaagcggcacgaaggggagatgtacagcgtgccatacagcactgggcaggggcagcctcagcagcagcagttgcccccagcccagccccagcctgccagccagcaacaagctgcccagccttcccctcagcaagatgtatacaaccagtatggcaatgcctatcctgccactgccacagctgctactgagcgccgaccagcaggcggcccccagaaccaatttccattccagtttggccgagaccgtgtctctgcaccccctggcaccaatgcccagcaaaacatgccaccacaaatgatgggcggccccatacaggcatcagctgaggttgctcagcaaggcaccatgtggcaggggcgtaatgacatgacctataattatgccaacaggcagagcacgggctctgccccccagggccccgcctatcatggcgtgaaccgaacagatgaaatgctgcacacagatcagagggccaaccacgaaggctcgtggccttcccatggcacacgccagcccccatatggtccctctgcccctgtgccccccatgacaaggccccctccatctaactaccagcccccaccaagcatgcagaatcacattcctcaggtatccagccctgctcccctgccccggccaatggagaaccgcacctctcctagcaagtctccattcctgcactctgggatgaaaatgcagaaggcaggtcccccagtacctgcctcgcacatagcacctgcccctgtgcagccccccatgattcggcgggatatcaccttcccacctggctctgttgaagccacacagcctgtgttgaagcagaggaggcggctcacaatgaaagacattggaaccccggaggcatggcgggtaatgatgtccctcaagtctggtctcctggcagagagcacatgggcattagataccatcaacatcctgctgtatgatgacaacagcatcatgaccttcaacctcagtcagctcccagggttgctagagctccttgtagaatatttccgacgatgcctgattgagatctttggcattttaaaggagtatgaggtgggtgacccaggacagagaacgctactggatcctgggaggttcagcaaggtgtctagtccagctcccatggagggtggggaagaagaagaagaacttctaggtcctaaactagaagaggaagaagaagaggaagtagttgaaaatgatgaggagatagccttttcaggcaaggacaagccagcttcagagaatagtgaggagaagctgatcagtaagtttgacaagcttccagtaaagatcgtacagaagaatgatccatttgtggtggactgctcagataagcttgggcgtgtgcaggagtttgacagtggcctgctgcactggcggattggtgggggggacaccactgagcatatccagacccacttcgagagcaagacagagctgctgccttcccggcctcacgcaccctgcccaccagcccctcggaagcatgtgacaacagcagagggtacaccagggacaacagaccaggaggggcccccacctgatggacctccagaaaaacggatcacagccactatggatgacatgttgtctactcggtctagcaccttgaccgaggatggagctaagagttcagaggccatcaaggagagcagcaagtttccatttggcattagcccagcacagagccaccggaacatcaagatcctagaggacgaaccccacagtaaggatgagaccccactgtgtacccttctggactggcaggattctcttgccaagcgctgcgtctgtgtgtccaataccattcgaagcctgtcatttgtgccaggcaatgactttgagatgtccaaacacccagggctgctgctcatcctgggcaagctgatcctgctgcaccacaagcacccagaacggaagcaggcaccactaacttatgaaaaggaggaggaacaggaccaaggggtgagctgcaacaaagtggagtggtggtgggactgcttggagatgctccgggaaaacaccttggttacactcgccaacatctcggggcagttggacctatctccataccccgagagcatttgcctgcctgtcctggacggactcctacactgggcagtttgcccttcagctgaagcccaggaccccttttccaccctgggccccaatgccgtcctttccccgcagagactggtcttggaaaccctcagcaaactcagcatccaggacaacaatgtggacctgattctggccacaccccccttcagccgcctggagaagttgtatagcactatggtgcgcttcctcagtgaccgaaagaacccggtgtgccgggagatggctgtggtactgctggccaacctggctcagggggacagcctggcagctcgtgccattgcagtgcagaagggcagtatcggcaacctcctgggcttcctagaggacagccttgccgccacacagttccagcagagccaggccagcctcctccacatgcagaacccaccctttgagccaactagtgtggacatgatgcggcgggctgcccgcgcgctgcttgccttggccaaggtggacgagaaccactcagagtttactctgtacgaatcacggctgttggacatctcggtatcaccgttgatgaactcattggtttcacaagtcatttgtgatgtactgtttttgattggccagtcatgacagccgtgggacacctcccccccccgtgtgtgtgtgcgtgtgtggagaacttagaaactgactgttgccctttatttatgcaaaaccacctcagaatccagtttaccctgtgctgtccagcttctcccttgggaaaaagtctctcctgtttctctctcctccttccacctcccctccctccatcacctcacgcctttctgttccttgtcctcaccttactcccctcaggaccctaccccaccctctttgaaaagacaaagctctgcctacatagaagactttttttattttaaccaaagttactgttgtttacagtgagtttggggaaaaaaaataaaataaaaatggctttcccagtccttgcatcaacgggatgccacatttcataactgtttttaatggtaaaaaaaaaaaaaaaaaatacaaaaaaaaattctgaaggacaaaaaaggtgactgctgaactgtgtgtggtttattgttgtacattcacaatcttgcaggagccaagaagttcgcagttgtgaacagaccctgttcactggagaggcctgtgcagtagagtgtagaccctttcatgtactgtactgtacacctgatactgtaaacatactgtaataataatgtctcacatggaaacagaaaacgctgggtcagcagcaagctgtagtttttaaaaatgtttttagttaaacgttgaggagaaaaaaaaaaaaggcttttcccccaaagtatcatgtgtgaacctacaacaccctgacctctttctctcctccttgattgtatgaataaccctgagatcacctcttagaactggttttaacctttagctgcagcggctacgctgccacgtgtgtatatatatgacgttgtacattgcacatacccttggatccccacagtttggtcctcctcccagctacccctttatagtatgacgagttaacaagttggtgacctgcacaaagcgagacacagctatttaatctcttgccagatatcgcccctcttggtgcgatgctgtacaggtctctgtaaaaagtccttgctgtctcagcagccaatcaacttatagtttatttttttctgggtttttgttttgttttgttttctttctaatcgaggtgtgaaaaagttctaggttcagttgaagttctgatgaagaaacacaattgagattttttcagtgataaaatctgcatatttgtatttcaacaatgtagctaaaacttgatgtaaattcctcctttttttccttttttggcttaatgaatatcatttattcagtatgaaatctttatactatatgttccacgtgttaagaataaatgtacattaaatcttggtaagacttt

SEQ ID NO: 61 - DNA, 8584 bp, Homo sapiens
cagaaagcggagagtcacagcggggccaggccctggggagcggagcctccaccgcccccctcattcccaggcaagggcttggggggaatgagccgggagagccgggtcccgagcctacagagccgggagcagctgagccgccggcgcctcggccgccgccgccgcctcctcctcctccgccgccgccagcccggagcctgagccggcggggcgggggggagaggagcgagcgcagcgcagcagcggagccccgcgaggcccgcccgggcgggtggggagggcagcccgggggactgggccccggggcggggtgggagggggggagaagacgaagacagggccgggtctctccgcggacgagacagcggggatcatggccgcgcaggtcgcccccgccgccgccagcagcctgggcaacccgccgccgccgccgccctcggagctgaagaaagccgagcagcagcagcgggaggaggcggggggcgaggcggcggcggcggcagcggccgagcgcggggaaatgaaggcagccgccgggcaggaaagcgagggccccgccgtggggccgccgcagccgctgggaaaggagctgcaggacggggccgagagcaatgggggtggcggcggcggcggagccggcagcggcggcgggcccggcgcggagccggacctgaagaactcgaacgggaacgcgggccctaggcccgccctgaacaataacctcacggagccgcccggcggcggcggtggcggcagcagcgatggggtgggggcgcctcctcactcagccgcggccgccttgccgcccccagcctacggcttcgggcaaccctacggccggagcccgtctgccgtcgccgccgccgcggccgccgtcttccaccaacaacatggcggacaacaaagccctggcctggcagcgctgcagagcggcggcggcgggggcctggagccctacgcggggccccagcagaactctcacgaccacggcttccccaaccaccagtacaactcctactaccccaaccgcagcgcctaccccccgcccgccccggcctacgcgctgagctccccgagaggtggcactccgggctccggcgcggcggcggctgccggctccaagccgcctccctcctccagcgcctccgcctcctcgtcgtcttcgtccttcgctcagcagcgcttcggggccatggggggaggcggcccctccgcggccggcgggggaactccccagcccaccgccacccccaccctcaaccaactgctcacgtcgcccagctcggcccggggctaccagggctaccccgggggcgactacagtggcgggccccaggacgggggcgccggcaagggcccggcggacatggcctcgcagtgttggggggctgcggcggcggcagctgcggcggcggccgcctcgggaggggcccaacaaaggagccaccacgcgcccatgagccccgggagcagcggcggcggggggcagccgctcgcccggacccctcagccatccagtccaatggatcagatgggcaagatgagacctcagccatatggcgggactaacccatactcgcagcaacagggacctccgtcaggaccgcagcaaggacatgggtacccagggcagccatacgggtcccagaccccgcagcggtacccgatgaccatgcagggccgggcgcagagtgccatgggcggcctctcttatacacagcagattcctccttatggacaacaaggccccagcgggtatggtcaacagggccagactccatattacaaccagcaaagtcctcaccctcagcagcagcagccaccctactcccagcaaccaccgtcccagacccctcatgcccaaccttcgtatcagcagcagccacagtctcaaccaccacagctccagtcctctcagcctccatactcccagcagccatcccagcctccacatcagcagtccccggctccatacccctcccagcagtcgacgacacagcagcacccccagagccagcccccctactcacagccacaggctcagtctccttaccagcagcagcaacctcagcagccagcaccctcgacgctctcccagcaggctgcgtatcctcagccccagtctcagcagtcccagcaaactgcctattcccagcagcgcttccctccaccgcaggagctatctcaagattcatttgggtctcaggcatcctcagccccctcaatgacctccagtaagggagggcaagaagatatgaacctgagccttcagtcaagaccctccagcttgcctgatctatctggttcaatagatgacctccccatggggacagaaggagctctgagtcctggagtgagcacatcagggatttccagcagccaaggagagcagagtaatccagctcagtctcctttctctcctcatacctcccctcacctgcctggcatccgaggcccttccccgtcccctgttggctctccgccagtgttgctcagtctcgctcaggaccactctcgcctgctgcagtgccaggcaaccagatgccacctcggccacccagtggccagtcggacagcatcatgcatccttccatgaaccaatcaagcattgcccaagatcgaggttatatgcagaggaacccccagatgccccagtacagttccccccagcccggctcagccttatctccgcgtcagccttccggaggacagatacacacaggcatgggctcctaccagcagaactccatggggagctatggtccccaggggggtcagtatggcccacaaggtggctaccccaggcagccaaactataatgccttgcccaatgccaactaccccagtgcaggcatggctggaggcataaaccccatgggtgccggaggtcaaatgcatggacagcctggcatcccaccttatggcacactccctccagggaggatgagtcacgcctccatgggcaaccggccttatggccctaacatggccaatatgccacctcaggttgggtcagggatgtgtcccccaccagggggcatgaaccggaaaacccaagaaactgctgtcgccatgcatgttgctgccaactctatccaaaacaggccgccaggctaccccaatatgaatcaagggggcatgatgggaactggacctccttatggacaagggattaatagtatggctggcatgatcaaccctcagggacccccatattccatgggtggaaccatggccaacaattctgcagggatggcagccagcccagagatgatgggccttggggatgtaaagttaactccagccaccaaaatgaacaacaaggcagatgggacacccaagacagaatccaaatccaagaaatccagttcttctactacaaccaatgagaagatcaccaagttgtatgagctgggtggtgagcctgagaggaagatgtgggtggaccgttatctggccttcactgaggagaaggccatgggcatgacaaatctgcctgctgtgggtaggaaacctctggacctctatcgcctctatgtgtctgtgaaggagattggtggattgactcaggtcaacaagaacaaaaaatggcgggaacttgcaaccaacctcaatgtgggcacatcaagcagtgctgccagctccttgaaaaagcagtatatccagtgtctctatgcctttgaatgcaagattgaacggggagaagaccctcccccagacatctttgcagctgctgattccaagaagtcccagcccaagatccagcctccctctcctgcgggatcaggatctatgcaggggccccagactccccagtcaaccagcagttccatggcagaaggaggagacttaaagccaccaactccagcatccacaccacacagtcagatccccccattgccaggcatgagcaggagcaattcagttgggatccaggatgcctttaatgatggaagtgactccacattccagaagcggaattccatgactccaaaccctgggtatcagcccagtatgaatacctctgacatgatggggcgcatgtcctatgagccaaataaggatccttatggcagcatgaggaaagctccagggagtgatcccttcatgtcctcagggcagggccccaacggcgggatgggtgacccctacagtcgtgctgccggccctgggctaggaaatgtggcgatgggaccacgacagcactatccctatggaggtccttatgacagagtgaggacggagcctggaatagggcctgagggaaacatgagcactggggccccacagccgaatctcatgccttccaacccagactcggggatgtattctcctagccgctaccccccgcagcagcagcagcagcagcagcaacgacatgattcctatggcaatcagttctccacccaaggcaccccttctggcagccccttccccagccagcagactacaatgtatcaacagcaacagcagaattacaagcggccaatggatggcacatatggccctcctgccaagcggcacgaaggggagatgtacagcgtgccatacagcactgggcaggggcagcctcagcagcagcagttgcccccagcccagccccagcctgccagccagcaacaagctgcccagccttcccctcagcaagatgtatacaaccagtatggcaatgcctatcctgccactgccacagctgctactgagcgccgaccagcaggcggcccccagaaccaatttccattccagtttggccgagaccgtgtctctgcaccccctggcaccaatgcccagcaaaacatgccaccacaaatgatgggcggccccatacaggcatcagctgaggttgctcagcaaggcaccatgtggcaggggcgtaatgacatgacctataattatgccaacaggcagagcacgggctctgccccccagggccccgcctatcatggcgtgaaccgaacagatgaaatgctgcacacagatcagagggccaaccacgaaggctcgtggccttcccatggcacacgccagcccccatatggtccctctgcccctgtgccccccatgacaaggccccctccatctaactaccagcccccaccaagcatgcagaatcacattcctcaggtatccagccctgctcccctgccccggccaatggagaaccgcacctctcctagcaagtctccattcctgcactctgggatgaaaatgcagaaggcaggtcccccagtacctgcctcgcacatagcacctgcccctgtgcagccccccatgattcggcgggatatcaccttcccacctggctctgttgaagccacacagcctgtgttgaagcagaggaggcggctcacaatgaaagacattggaaccccggaggcatggcgggtaatgatgtccctcaagtctggtctcctggcagagagcacatgggcattagataccatcaacatcctgctgtatgatgacaacagcatcatgaccttcaacctcagtcagctcccagggttgctagagctccttgtagaatatttccgacgatgcctgattgagatctttggcattttaaaggagtatgaggtgggtgacccaggacagagaacgctactggatcctgggaggttcagcaaggtgtctagtccagctcccatggagggtggggaagaagaagaagaacttctaggtcctaaactagaagaggaagaagaagaggaagtagttgaaaatgatgaggagatagccttttcaggcaaggacaagccagcttcagagaatagtgaggagaagctgatcagtaagtttgacaagcttccagtaaagatcgtacagaagaatgatccatttgtggtggactgctcagataagcttgggcgtgtgcaggagtttgacagtggcctgctgcactggcggattggtgggggggacaccactgagcatatccagacccacttcgagagcaagacagagctgctgccttcccggcctcacgcaccctgcccaccagcccctcggaagcatgtgacaacagcagagggtacaccagggacaacagaccaggaggggcccccacctgatggacctccagaaaaacggatcacagccactatggatgacatgttgtctactcggtctagcaccttgaccgaggatggagctaagagttcagaggccatcaaggagagcagcaagtttccatttggcattagcccagcacagagccaccggaacatcaagatcctagaggacgaaccccacagtaaggatgagaccccactgtgtacccttctggactggcaggattctcttgccaagcgctgcgtctgtgtgtccaataccattcgaagcctgtcatttgtgccaggcaatgactttgagatgtccaaacacccagggctgctgctcatcctgggcaagctgatcctgctgcaccacaagcacccagaacggaagcaggcaccactaacttatgaaaaggaggaggaacaggaccaaggggtgagctgcaacaaagtggagtggtggtgggactgcttggagatgctccgggaaaacaccttggttacactcgccaacatctcggggcagttggacctatctccataccccgagagcatttgcctgcctgtcctggacggactcctacactgggcagtttgcccttcagctgaagcccaggaccccttttccaccctgggccccaatgccgtcctttccccgcagagactggtcttggaaaccctcagcaaactcagcatccaggacaacaatgtggacctgattctggccacaccccccttcagccgcctggagaagttgtatagcactatggtgcgcttcctcagtgaccgaaagaacccggtgtgccgggagatggctgtggtactgctggccaacctggctcagggggacagcctggcagctcgtgccattgcagtgcagaagggcagtatcggcaacctcctgggcttcctagaggacagccttgccgccacacagttccagcagagccaggccagcctcctccacatgcagaacccaccctttgagccaactagtgtggacatgatgcggcgggctgcccgcgcgctgcttgccttggccaaggtggacgagaaccactcagagtttactctgtacgaatcacggctgttggacatctcggtatcaccgttgatgaactcattggtttcacaagtcatttgtgatgtactgtttttgattggccagtcatgacagccgtgggacacctcccccccccgtgtgtgtgtgcgtgtgtggagaacttagaaactgactgttgccctttatttatgcaaaaccacctcagaatccagtttaccctgtgctgtccagcttctcccttgggaaaaagtctctcctgtttctctctcctccttccacctcccctccctccatcacctcacgcctttctgttccttgtcctcaccttactcccctcaggaccctaccccaccctctttgaaaagacaaagctctgcctacatagaagactttttttattttaaccaaagttactgttgtttacagtgagtttggggaaaaaaaataaaataaaaatggctttcccagtccttgcatcaacgggatgccacatttcataactgtttttaatggtaaaaaaaaaaaaaaaaaatacaaaaaaaaattctgaaggacaaaaaaggtgactgctgaactgtgtgtggtttattgttgtacattcacaatcttgcaggagccaagaagttcgcagttgtgaacagaccctgttcactggagaggcctgtgcagtagagtgtagaccctttcatgtactgtactgtacacctgatactgtaaacatactgtaataataatgtctcacatggaaacagaaaacgctgggtcagcagcaagctgtagtttttaaaaatgtttttagttaaacgttgaggagaaaaaaaaaaaaggcttttcccccaaagtatcatgtgtgaacctacaacaccctgacctctttctctcctccttgattgtatgaataaccctgagatcacctcttagaactggttttaacctttagctgcagcggctacgctgccacgtgtgtatatatatgacgttgtacattgcacatacccttggatccccacagtttggtcctcctcccagctacccctttatagtatgacgagttaacaagttggtgacctgcacaaagcgagacacagctatttaatctcttgccagatatcgcccctcttggtgcgatgctgtacaggtctctgtaaaaagtccttgctgtctcagcagccaatcaacttatagtttatttttttctgggtttttgttttgttttgttttctttctaatcgaggtgtgaaaaagttctaggttcagttgaagttctgatgaagaaacacaattgagattttttcagtgataaaatctgcatatttgtatttcaacaatgtagctaaaacttgatgtaaattcctcctttttttccttttttggcttaatgaatatcatttattcagtatgaaatctttatactatatgttccacgtgttaagaataaatgtacattaaatcttggtaagacttt

SEQ ID NO: 62 - DNA, 8585 bp, Homo sapiens
cagaaagcggagagtcacagcggggccaggccctggggagcggagcctccaccgcccccctcattcccaggcaagggcttggggggaatgagccgggagagccgggtcccgagcctacagagccgggagcagctgagccgccggcgcctcggccgccgccgccgcctcctcctcctccgccgccgccagcccggagcctgagccggcggggcgggggggagaggagcgagcgcagcgcagcagcggagccccgcgaggcccgcccgggcgggtggggagggcagcccgggggactgggccccggggcggggtgggagggggggagaagacgaagacagggccgggtctctccgcggacgagacagcggggatcatggccgcgcaggtcgcccccgccgccgccagcagcctgggcaacccgccgccgccgccgccctcggagctgaagaaagccgagcagcagcagcgggaggaggcggggggcgaggcggcggcggcggcagcggccgagcgcggggaaatgaaggcagccgccgggcaggaaagcgagggccccgccgtggggccgccgcagccgctgggaaaggagctgcaggacggggccgagagcaatgggggtggcggcggcggcggagccggcagcggcggcgggcccggcgcggagccggacctgaagaactcgaacgggaacgcgggccctaggcccgccctgaacaataacctcacggagccgcccggcggcggcggtggcggcagcagcgatggggtgggggcgcctcctcactcagccgcggccgccttgccgcccccagcctacggcttcgggcaaccctacggccggagcccgtctgccgtcgccgccgccgcggccgccgtcttccaccaacaacatggcggacaacaaagccctggcctggcagcgctgcagagcggcggcggcgggggcctggagccctacgcggggccccagcagaactctcacgaccacggcttccccaaccaccagtacaactcctactaccccaaccgcagcgcctaccccccgcccgccccggcctacgcgctgagctccccgagaggtggcactccgggctccggcgcggcggcggctgccggctccaagccgcctccctcctccagcgcctccgcctcctcgtcgtcttcgtccttcgctcagcagcgcttcggggccatggggggaggcggcccctccgcggccggcgggggaactccccagcccaccgccacccccaccctcaaccaactgctcacgtcgcccagctcggcccggggctaccagggctaccccgggggcgactacagtggcgggccccaggacgggggcgccggcaagggcccggcggacatggcctcgcagtgttggggggctgcggcggcggcagctgcggcggcggccgcctcgggaggggcccaacaaaggagccaccacgcgcccatgagccccgggagcagcggcggcggggggcagccgctcgcccggacccctcagccatccagtccaatggatcagatgggcaagatgagacctcagccatatggcgggactaacccatactcgcagcaacagggacctccgtcaggaccgcagcaaggacatgggtacccagggcagccatacgggtcccagaccccgcagcggtacccgatgaccatgcagggccgggcgcagagtgccatgggcggcctctcttatacacagcagattcctccttatggacaacaaggccccagcgggtatggtcaacagggccagactccatattacaaccagcaaagtcctcaccctcagcagcagcagccaccctactcccagcaaccaccgtcccagacccctcatgcccaaccttcgtatcagcagcagccacagtctcaaccaccacagctccagtcctctcagcctccatactcccagcagccatcccagcctccacatcagcagtccccggctccatacccctcccagcagtcgacgacacagcagcacccccagagccagcccccctactcacagccacaggctcagtctccttaccagcagcagcaacctcagcagccagcaccctcgacgctctcccagcaggctgcgtatcctcagccccagtctcagcagtcccagcaaactgcctattcccagcagcgcttccctccaccgcaggagctatctcaagattcatttgggtctcaggcatcctcagccccctcaatgacctccagtaagggagggcaagaagatatgaacctgagccttcagtcaagaccctccagcttgcctgatctatctggttcaatagatgacctccccatggggacagaaggagctctgagtcctggagtgagcacatcagggatttccagcagccaaggagagcagagtaatccagctcagtctcctttctctcctcatacctcccctcacctgcctggcatccgaggcccttccccgtcccctgttggctctcccgccagtgttgctcagtctcgctcaggaccactctcgcctgctgcagtgccaggcaaccagatgccacctcggccacccagtggccagtcggacagcatcatgcatccttccatgaaccaatcaagcattgcccaagatcgaggttatatgcagaggaacccccagatgccccagtacagttccccccagcccggctcagccttatctccgcgtcagccttccggaggacagatacacacaggcatgggctcctaccagcagaactccatggggagctatggtccccaggggggtcagtatggcccacaaggtggctaccccaggcagccaaactataatgccttgcccaatgccaactaccccagtgcaggcatggctggaggcataaaccccatgggtgccggaggtcaaatgcatggacagcctggcatcccaccttatggcacactccctccagggaggatgagtcacgcctccatgggcaaccggccttatggccctaacatggccaatatgccacctcaggttgggtcagggatgtgtcccccaccagggggcatgaaccggaaaacccaagaaactgctgtcgccatgcatgttgctgccaactctatccaaaacaggccgccaggctaccccaatatgaatcaagggggcatgatgggaactggacctccttatggacaagggattaatagtatggctggcatgatcaaccctcagggacccccatattccatgggtggaaccatggccaacaattctgcagggatggcagccagcccagagatgatgggccttgcggatgtaaagttaactccagccaccaaaatgaacaacaaggcagatgggacacccaagacagaatccaaatccaagaaatccagttcttctactacaaccaatgagaagatcaccaagttgtatgagctgggtggtgagcctgagaggaagatgtgggtggaccgttatctggccttcactgaggagaaggccatgggcatgacaaatctgcctgctgtgggtaggaaacctctggacctctatcgcctctatgtgtctgtgaaggagattggtggattgactcaggtcaacaagaacaaaaaatggcgggaacttgcaaccaacctcaatgtgggcacatcaagcagtgctgccagctccttgaaaaagcagtatatccagtgtctctatgcctttgaatgcaagattgaacggggagaagaccctcccccagacatctttgcagctgctgattccaagaagtcccagcccaagatccagcctccctctcctgcgggatcaggatctatgcaggggccccagactccccagtcaaccagcagttccatggcagaaggaggagacttaaagccaccaactccagcatccacaccacacagtcagatccccccattgccaggcatgagcaggagcaattcagttgggatccaggatgcctttaatgatggaagtgactccacattccagaagcggaattccatgactccaaaccctgggtatcagcccagtatgaatacctctgacatgatggggcgcatgtcctatgagccaaataaggatccttatggcagcatgaggaaagctccagggagtgatcccttcatgtcctcagggcagggccccaacggcgggatgggtgacccctacagtcgtgctgccggccctgggctaggaaatgtggcgatgggaccacgacagcactatccctatggaggtccttatgacagagtgaggacggagcctggaatagggcctgagggaaacatgagcactggggccccacagccgaatctcatgccttccaacccagactcggggatgtattctcctagccgctaccccccgcagcagcagcagcagcagcagcaacgacatgattcctatggcaatcagttctccacccaaggcaccccttctggcagccccttccccagccagcagactacaatgtatcaacagcaacagcagaattacaagcggccaatggatggcacatatggccctcctgccaagcggcacgaaggggagatgtacagcgtgccatacagcactgggcaggggcagcctcagcagcagcagttgcccccagcccagccccagcctgccagccagcaacaagctgcccagccttcccctcagcaagatgtatacaaccagtatggcaatgcctatcctgccactgccacagctgctactgagcgccgaccagcaggcggcccccagaaccaatttccattccagtttggccgagaccgtgtctctgcaccccctggcaccaatgcccagcaaaacatgccaccacaaatgatgggcggccccatacaggcatcagctgaggttgctcagcaaggcaccatgtggcaggggcgtaatgacatgacctataattatgccaacaggcagagcacgggctctgccccccagggccccgcctatcatggcgtgaaccgaacagatgaaatgctgcacacagatcagagggccaaccacgaaggctcgtggccttcccatggcacacgccagcccccatatggtccctctgcccctgtgccccccatgacaaggccccctccatctaactaccagcccccaccaagcatgcagaatcacattcctcaggtatccagccctgctcccctgccccggccaatggagaaccgcacctctcctagcaagtctccattcctgcactctgggatgaaaatgcagaaggcaggtcccccagtacctgcctcgcacatagcacctgcccctgtgcagccccccatgattcggcgggatatcaccttcccacctggctctgttgaagccacacagcctgtgttgaagcagaggaggcggctcacaatgaaagacattggaaccccggaggcatggcgggtaatgatgtccctcaagtctggtctcctggcagagagcacatgggcattagataccatcaacatcctgctgtatgatgacaacagcatcatgaccttcaacctcagtcagctcccagggttgctagagctccttgtagaatatttccgacgatgcctgattgagatctttggcattttaaaggagtatgaggtgggtgacccaggacagagaacgctactggatcctgggaggttcagcaaggtgtctagtccagctcccatggagggtggggaagaagaagaagaacttctaggtcctaaactagaagaggaagaagaagaggaagtagttgaaaatgatgaggagatagccttttcaggcaaggacaagccagcttcagagaatagtgaggagaagctgatcagtaagtttgacaagcttccagtaaagatcgtacagaagaatgatccatttgtggtggactgctcagataagcttgggcgtgtgcaggagtttgacagtggcctgctgcactggcggattggtgggggggacaccactgagcatatccagacccacttcgagagcaagacagagctgctgccttcccggcctcacgcaccctgcccaccagcccctcggaagcatgtgacaacagcagagggtacaccagggacaacagaccaggaggggcccccacctgatggacctccagaaaaacggatcacagccactatggatgacatgttgtctactcggtctagcaccttgaccgaggatggagctaagagttcagaggccatcaaggagagcagcaagtttccatttggcattagcccagcacagagccaccggaacatcaagatcctagaggacgaaccccacagtaaggatgagaccccactgtgtacccttctggactggcaggattctcttgccaagcgctgcgtctgtgtgtccaataccattcgaagcctgtcatttgtgccaggcaatgactttgagatgtccaaacacccagggctgctgctcatcctgggcaagctgatcctgctgcaccacaagcacccagaacggaagcaggcaccactaacttatgaaaaggaggaggaacaggaccaaggggtgagctgcaacaaagtggagtggtggtgggactgcttggagatgctccgggaaaacaccttggttacactcgccaacatctcggggcagttggacctatctccataccccgagagcatttgcctgcctgtcctggacggactcctacactgggcagtttgcccttcagctgaagcccaggaccccttttccaccctgggccccaatgccgtcctttccccgcagagactggtcttggaaaccctcagcaaactcagcatccaggacaacaatgtggacctgattctggccacaccccccttcagccgcctggagaagttgtatagcactatggtgcgcttcctcagtgaccgaaagaacccggtgtgccgggagatggctgtggtactgctggccaacctggctcagggggacagcctggcagctcgtgccattgcagtgcagaagggcagtatcggcaacctcctgggcttcctagaggacagccttgccgccacacagttccagcagagccaggccagcctcctccacatgcagaacccaccctttgagccaactagtgtggacatgatgcggcgggctgcccgcgcgctgcttgccttggccaaggtggacgagaaccactcagagtttactctgtacgaatcacggctgttggacatctcggtatcaccgttgatgaactcattggtttcacaagtcatttgtgatgtactgtttttgattggccagtcatgacagccgtgggacacctcccccccccgtgtgtgtgtgcgtgtgtggagaacttagaaactgactgttgccctttatttatgcaaaaccacctcagaatccagtttaccctgtgctgtccagcttctcccttgggaaaaagtctctcctgtttctctctcctccttccacctcccctccctccatcacctcacgcctttctgttccttgtcctcaccttactcccctcaggaccctaccccaccctctttgaaaagacaaagctctgcctacatagaagactttttttattttaaccaaagttactgttgtttacagtgagtttggggaaaaaaaataaaataaaaatggctttcccagtccttgcatcaacgggatgccacatttcataactgtttttaatggtaaaaaaaaaaaaaaaaaatacaaaaaaaaattctgaaggacaaaaaaggtgactgctgaactgtgtgtggtttattgttgtacattcacaatcttgcaggagccaagaagttcgcagttgtgaacagaccctgttcactggagaggcctgtgcagtagagtgtagaccctttcatgtactgtactgtacacctgatactgtaaacatactgtaataataatgtctcacatggaaacagaaaacgctgggtcagcagcaagctgtagtttttaaaaatgtttttagttaaacgttgaggagaaaaaaaaaaaaggcttttcccccaaagtatcatgtgtgaacctacaacaccctgacctctttctctcctccttgattgtatgaataaccctgagatcacctcttagaactggttttaacctttagctgcagcggctacgctgccacgtgtgtatatatatgacgttgtacattgcacatacccttggatccccacagtttggtcctcctcccagctacccctttatagtatgacgagttaacaagttggtgacctgcacaaagcgagacacagctatttaatctcttgccagatatcgcccctcttggtgcgatgctgtacaggtctctgtaaaaagtccttgctgtctcagcagccaatcaacttatagtttatttttttctgggtttttgttttgttttgttttctttctaatcgaggtgtgaaaaagttctaggttcagttgaagttctgatgaagaaacacaattgagattttttcagtgataaaatctgcatatttgtatttcaacaatgtagctaaaacttgatgtaaattcctcctttttttccttttttggcttaatgaatatcatttattcagtatgaaatctttatactatatgttccacgtgttaagaataaatgtacattaaatcttggtaagacttt

SEQ ID NO: 63 - DNA, 8586 bp, Homo sapiens
cagaaagcggagagtcacagcggggccaggccctggggagcggagcctccaccgcccccctcattcccaggcaagggcttggggggaatgagccgggagagccgggtcccgagcctacagagccgggagcagctgagccgccggcgcctcggccgccgccgccgcctcctcctcctccgccgccgccagcccggagcctgagccggcggggcgggggggagaggagcgagcgcagcgcagcagcggagccccgcgaggcccgcccgggcgggtggggagggcagcccgggggactgggccccggggcggggtgggagggggggagaagacgaagacagggccgggtctctccgcggacgagacagcggggatcatggccgcgcaggtcgcccccgccgccgccagcagcctgggcaacccgccgccgccgccgccctcggagctgaagaaagccgagcagcagcagcgggaggaggcggggggcgaggcggcggcggcggcagcggccgagcgcggggaaatggaaggcagccgccgggcaggaaagcgagggccccgccgtggggccgccgcagccgctgggaaaggagctgcaggacggggccgagagcaatgggggtggcggcggcggcggagccggcagcggcggcgggcccggcgcggagccggacctgaagaactcgaacgggaacgcgggccctaggcccgccctgaacaataacctcacggagccgcccggcggcggcggtggcggcagcagcgatggggtgggggcgcctcctcactcagccgcggccgccttgccgcccccagcctacggcttcgggcaaccctacggccggagcccgtctgccgtcgccgccgccgcggccgccgtcttccaccaacaacatggcggacaacaaagccctggcctggcagcgctgcagagcggcggcggcgggggcctggagccctacgcggggccccagcagaactctcacgaccacggcttccccaaccaccagtacaactcctactaccccaaccgcagcgcctaccccccgcccgccccggcctacgcgctgagctccccgagaggtggcactccgggctccggcgcggcggcggctgccggctccaagccgcctccctcctccagcgcctccgcctcctcgtcgtcttcgtccttcgctcagcagcgcttcggggccatggggggaggcggcccctccgcggccggcgggggaactccccagcccaccgccacccccaccctcaaccaactgctcacgtcgcccagctcggcccggggctaccagggctaccccgggggcgactacagtggcgggccccaggacgggggcgccggcaagggcccggcggacatggcctcgcagtgttggggggctgcggcggcggcagctgcggcggcggccgcctcgggaggggcccaacaaaggagccaccacgcgcccatgagccccgggagcagcggcggcggggggcagccgctcgcccggacccctcagccatccagtccaatggatcagatgggcaagatgagacctcagccatatggcgggactaacccatactcgcagcaacagggacctccgtcaggaccgcagcaaggacatgggtacccagggcagccatacgggtcccagaccccgcagcggtacccgatgaccatgcagggccgggcgcagagtgccatgggcggcctctcttatacacagcagattcctccttatggacaacaaggccccagcgggtatggtcaacagggccagactccatattacaaccagcaaagtcctcaccctcagcagcagcagccaccctactcccagcaaccaccgtcccagacccctcatgcccaaccttcgtatcagcagcagccacagtctcaaccaccacagctccagtcctctcagcctccatactcccagcagccatcccagcctccacatcagcagtccccggctccatacccctcccagcagtcgacgacacagcagcacccccagagccagcccccctactcacagccacaggctcagtctccttaccagcagcagcaacctcagcagccagcaccctcgacgctctcccagcaggctgcgtatcctcagccccagtctcagcagtcccagcaaactgcctattcccagcagcgcttccctccaccgcaggagctatctcaagattcatttgggtctcaggcatcctcagccccctcaatgacctccagtaagggagggcaagaagatatgaacctgagccttcagtcaagaccctccagcttgcctgatctatctggttcaatagatgacctccccatggggacagaaggagctctgagtcctggagtgagcacatcagggatttccagcagccaaggagagcagagtaatccagctcagtctcctttctctcctcatacctcccctcacctgcctggcatccgaggcccttccccgtcccctgttggctctcccgccagtgttgctcagtctcgctcaggaccactctcgcctgctgcagtgccaggcaaccagatgccacctcggccacccagtggccagtcggacagcatcatgcatccttccatgaaccaatcaagcattgcccaagatcgaggttatatgcagaggaacccccagatgccccagtacagttccccccagcccggctcagccttatctccgcgtcagccttccggaggacagatacacacaggcatgggctcctaccagcagaactccatggggagctatggtccccaggggggtcagtatggcccacaaggtggctaccccaggcagccaaactataatgccttgcccaatgccaactaccccagtgcaggcatggctggaggcataaaccccatgggtgccggaggtcaaatgcatggacagcctggcatcccaccttatggcacactccctccagggaggatgagtcacgcctccatgggcaaccggccttatggccctaacatggccaatatgccacctcaggttgggtcagggatgtgtcccccaccagggggcatgaaccggaaaacccaagaaactgctgtcgccatgcatgttgctgccaactctatccaaaacaggccgccaggctaccccaatatgaatcaagggggcatgatgggaactggacctccttatggacaagggattaatagtatggctggcatgatcaaccctcagggacccccatattccatgggtggaaccatggccaacaattctgcagggatggcagccagcccagagatgatgggccttggggatgtaaagttaactccagccaccaaaatgaacaacaaggcagatgggacacccaagacagaatccaaatccaagaaatccagttcttctactacaaccaatgagaagatcaccaagttgtatgagctgggtggtgagcctgagaggaagatgtgggtggaccgttatctggccttcactgaggagaaggccatgggcatgacaaatctgcctgctgtgggtaggaaacctctggacctctatcgcctctatgtgtctgtgaaggagattggtggattgactcaggtcaacaagaacaaaaaatggcgggaacttgcaaccaacctcaatgtgggcacatcaagcagtgctgccagctccttgaaaaagcagtatatccagtgtctctatgcctttgaatgcaagattgaacggggagaagaccctcccccagacatctttgcagctgctgattccaagaagtcccagcccaagatccagcctccctctcctgcgggatcaggatctatgcaggggccccagactccccagtcaaccagcagttccatggcagaaggaggagacttaaagccaccaactccagcatccacaccacacagtcagatccccccattgccaggcatgagcaggagcaattcagttgggatccaggatgcctttaatgatggaagtgactccacattccagaagcggaattccatgactccaaaccctgggtatcagcccagtatgaatacctctgacatgatggggcgcatgtcctatgagccaaataaggatccttatggcagcatgaggaaagctccagggagtgatcccttcatgtcctcagggcagggccccaacggcgggatgggtgacccctacagtcgtgctgccggccctgggctaggaaatgtggcgatgggaccacgacagcactatccctatggaggtccttatgacagagtgaggacggagcctggaatagggcctgagggaaacatgagcactggggccccacagccgaatctcatgccttccaacccagactcggggatgtattctcctagccgctaccccccgcagcagcagcagcagcagcagcaacgacatgattcctatggcaatcagttctccacccaaggcaccccttctggcagccccttccccagccagcagactacaatgtatcaacagcaacagcagaattacaagcggccaatggatggcacatatggccctcctgccaagcggcacgaaggggagatgtacagcgtgccatacagcactgggcaggggcagcctcagcagcagcagttgcccccagcccagccccagcctgccagccagcaacaagctgcccagccttcccctcagcaagatgtatacaaccagtatggcaatgcctatcctgccactgccacagctgctactgagcgccgaccagcaggcggcccccagaaccaatttccattccagtttggccgagaccgtgtctctgcaccccctggcaccaatgcccagcaaaacatgccaccacaaatgatgggcggccccatacaggcatcagctgaggttgctcagcaaggcaccatgtggcaggggcgtaatgacatgacctataattatgccaacaggcagagcacgggctctgccccccagggccccgcctatcatggcgtgaaccgaacagatgaaatgctgcacacagatcagagggccaaccacgaaggctcgtggccttcccatggcacacgccagcccccatatggtccctctgcccctgtgccccccatgacaaggccccctccatctaactaccagcccccaccaagcatgcagaatcacattcctcaggtatccagccctgctcccctgccccggccaatggagaaccgcacctctcctagcaagtctccattcctgcactctgggatgaaaatgcagaaggcaggtcccccagtacctgcctcgcacatagcacctgcccctgtgcagccccccatgattcggcgggatatcaccttcccacctggctctgttgaagccacacagcctgtgttgaagcagaggaggcggctcacaatgaaagacattggaaccccggaggcatggcgggtaatgatgtccctcaagtctggtctcctggcagagagcacatgggcattagataccatcaacatcctgctgtatgatgacaacagcatcatgaccttcaacctcagtcagctcccagggttgctagagctccttgtagaatatttccgacgatgcctgattgagatctttggcattttaaaggagtatgaggtgggtgacccaggacagagaacgctactggatcctgggaggttcagcaaggtgtctagtccagctcccatggagggtggggaagaagaagaagaacttctaggtcctaaactagaagaggaagaagaagaggaagtagttgaaaatgatgaggagatagccttttcaggcaaggacaagccagcttcagagaatagtgaggagaagctgatcagtaagtttgacaagcttccagtaaagatcgtacagaagaatgatccatttgtggtggactgctcagataagcttgggcgtgtgcaggagtttgacagtggcctgctgcactggcggattggtgggggggacaccactgagcatatccagacccacttcgagagcaagacagagctgctgccttcccggcctcacgcaccctgcccaccagcccctcggaagcatgtgacaacagcagagggtacaccagggacaacagaccaggaggggcccccacctgatggacctccagaaaaacggatcacagccactatggatgacatgttgtctactcggtctagcaccttgaccgaggatggagctaagagttcagaggccatcaaggagagcagcaagtttccatttggcattagcccagcacagagccaccggaacatcaagatcctagaggacgaaccccacagtaaggatgagaccccactgtgtacccttctggactggcaggattctcttgccaagcgctgcgtctgtgtgtccaataccattcgaagcctgtcatttgtgccaggcaatgactttgagatgtccaaacacccagggctgctgctcatcctgggcaagctgatcctgctgcaccacaagcacccagaacggaagcaggcaccactaacttatgaaaaggaggaggaacaggaccaaggggtgagctgcaacaaagtggagtggtggtgggactgcttggagatgctccgggaaaacaccttggttacactcgccaacatctcggggcagttggacctatctccataccccgagagcatttgcctgcctgtcctggacggactcctacactgggcagtttgcccttcagctgaagcccaggaccccttttccaccctgggccccaatgccgtcctttccccgcagagactggtcttggaaaccctcagcaaactcagcatccaggacaacaatgtggacctgattctggccacaccccccttcagccgcctggagaagttgtatagcactatggtgcgcttcctcagtgaccgaaagaacccggtgtgccgggagatggctgtggtactgctggccaacctggctcagggggacagcctggcagctcgtgccattgcagtgcagaagggcagtatcggcaacctcctgggcttcctagaggacagccttgccgccacacagttccagcagagccaggccagcctcctccacatgcagaacccaccctttgagccaactagtgtggacatgatgcggcgggctgcccgcgcgctgcttgccttggccaaggtggacgagaaccactcagagtttactctgtacgaatcacggctgttggacatctcggtatcaccgttgatgaactcattggtttcacaagtcatttgtgatgtactgtttttgattggccagtcatgacagccgtgggacacctcccccccccgtgtgtgtgtgcgtgtgtggagaacttagaaactgactgttgccctttatttatgcaaaaccacctcagaatccagtttaccctgtgctgtccagcttctcccttgggaaaaagtctctcctgtttctctctcctccttccacctcccctccctccatcacctcacgcctttctgttccttgtcctcaccttactcccctcaggaccctaccccaccctctttgaaaagacaaagctctgcctacatagaagactttttttattttaaccaaagttactgttgtttacagtgagtttggggaaaaaaaataaaataaaaatggctttcccagtccttgcatcaacgggatgccacatttcataactgtttttaatggtaaaaaaaaaaaaaaaaaatacaaaaaaaaattctgaaggacaaaaaaggtgactgctgaactgtgtgtggtttattgttgtacattcacaatcttgcaggagccaagaagttcgcagttgtgaacagaccctgttcactggagaggcctgtgcagtagagtgtagaccctttcatgtactgtactgtacacctgatactgtaaacatactgtaataataatgtctcacatggaaacagaaaacgctgggtcagcagcaagctgtagtttttaaaaatgtttttagttaaacgttgaggagaaaaaaaaaaaaggcttttcccccaaagtatcatgtgtgaacctacaacaccctgacctctttctctcctccttgattgtatgaataaccctgagatcacctcttagaactggttttaacctttagctgcagcggctacgctgccacgtgtgtatatatatgacgttgtacattgcacatacccttggatccccacagtttggtcctcctcccagctacccctttatagtatgacgagttaacaagttggtgacctgcacaaagcgagacacagctatttaatctcttgccagatatcgcccctcttggtgcgatgctgtacaggtctctgtaaaaagtccttgctgtctcagcagccaatcaacttatagtttatttttttctgggtttttgttttgttttgttttctttctaatcgaggtgtgaaaaagttctaggttcagttgaagttctgatgaagaaacacaattgagattttttcagtgataaaatctgcatatttgtatttcaacaatgtagctaaaacttgatgtaaattcctcctttttttccttttttggcttaatgaatatcatttattcagtatgaaatctttatactatatgttccacgtgttaagaataaatgtacattaaatcttggtaagacttt

SEQ ID NO: 64 - DNA, 8586 bp, Homo sapiens
cagaaagcggagagtcacagcggggccaggccctggggagcggagcctccaccgcccccctcattcccaggcaagggcttggggggaatgagccgggagagccgggtcccgagcctacagagccgggagcagctgagccgccggcgcctcggccgccgccgccgcctcctcctcctccgccgccgccagcccggagcctgagccggcggggcgggggggagaggagcgagcgcagcgcagcagcggagccccgcgaggcccgcccgggcgggtggggagggcagcccgggggactgggccccggggcggggtgggagggggggagaagacgaagacagggccgggtctctccgcggacgagacagcggggatcatggccgcgcaggtcgcccccgccgccgccagcagcctgggcaacccgccgccgccgccgccctcggagctgaagaaagccgagcagcagcagcgggaggaggcggggggcgaggcggcggcggcggcagcggccgagcgcggggaaatgaaggcagccgccgggcaggaaagcgagggccccgccgtggggccgccgcagccgctgggaaaggagctgcaggacggggccgagagcaatgggggtggcggcggcggcggagccggcagcggcggcgggcccggcgcggagccggacctgaagaactcgaacgggaacgcgggccctaggcccgccctgaacaataacctcacggagccgcccggcggcggcggtggcggcagcagcgatggggtgggggcgcctcctcactcagccgcggccgccttgccgcccccagcctacggcttcgggcaaccctacggccggagcccgtctgccgtcgccgccgccgcggccgccgtcttccaccaacaacatggcggacaacaaagccctggcctggcagcgctgcagagcggcggcggcgggggcctggagccctacgcggggccccagcagaactctcacgaccacggcttccccaaccaccagtacaactcctactaccccaaccgcagcgcctaccccccgcccgccccggcctacgcgctgagctccccgagaggtggcactccgggctccggcgcggcggcggctgccggctccaagccgcctccctcctccagcgcctccgcctcctcgtcgtcttcgtccttcgctcagcagcgcttcggggccatggggggaggcggcccctccgcggccggcgggggaactccccagcccaccgccacccccaccctcaaccaactgctcacgtcgcccagctcggcccggggctaccagggctaccccgggggcgactacagtggcgggccccaggacgggggcgccggcaagggcccggcggacatggcctcgcagtgttggggggctgcggcggcggcagctgcggcggcggccgcctcgggaggggcccaacaaaggagccaccacgcgcccatgagccccgggagcagcggcggcgggggggcagccgctcgcccggacccctcagccatccagtccaatggatcagatgggcaagatgagacctcagccatatggcgggactaacccatactcgcagcaacagggacctccgtcaggaccgcagcaaggacatgggtacccagggcagccatacgggtcccagaccccgcagcggtacccgatgaccatgcagggccgggcgcagagtgccatgggcggcctctcttatacacagcagattcctccttatggacaacaaggccccagcgggtatggtcaacagggccagactccatattacaaccagcaaagtcctcaccctcagcagcagcagccaccctactcccagcaaccaccgtcccagacccctcatgcccaaccttcgtatcagcagcagccacagtctcaaccaccacagctccagtcctctcagcctccatactcccagcagccatcccagcctccacatcagcagtccccggctccatacccctcccagcagtcgacgacacagcagcacccccagagccagcccccctactcacagccacaggctcagtctccttaccagcagcagcaacctcagcagccagcaccctcgacgctctcccagcaggctgcgtatcctcagccccagtctcagcagtcccagcaaactgcctattcccagcagcgcttccctccaccgcaggagctatctcaagattcatttgggtctcaggcatcctcagccccctcaatgacctccagtaagggagggcaagaagatatgaacctgagccttcagtcaagaccctccagcttgcctgatctatctggttcaatagatgacctccccatggggacagaaggagctctgagtcctggagtgagcacatcagggatttccagcagccaaggagagcagagtaatccagctcagtctcctttctctcctcatacctcccctcacctgcctggcatccgaggcccttccccgtcccctgttggctctcccgccagtgttgctcagtctcgctcaggaccactctcgcctgctgcagtgccaggcaaccagatgccacctcggccacccagtggccagtcggacagcatcatgcatccttccatgaaccaatcaagcattgcccaagatcgaggttatatgcagaggaacccccagatgccccagtacagttccccccagcccggctcagccttatctccgcgtcagccttccggaggacagatacacacaggcatgggctcctaccagcagaactccatggggagctatggtccccaggggggtcagtatggcccacaaggtggctaccccaggcagccaaactataatgccttgcccaatgccaactaccccagtgcaggcatggctggaggcataaaccccatgggtgccggaggtcaaatgcatggacagcctggcatcccaccttatggcacactccctccagggaggatgagtcacgcctccatgggcaaccggccttatggccctaacatggccaatatgccacctcaggttgggtcagggatgtgtcccccaccagggggcatgaaccggaaaacccaagaaactgctgtcgccatgcatgttgctgccaactctatccaaaacaggccgccaggctaccccaatatgaatcaagggggcatgatgggaactggacctccttatggacaagggattaatagtatggctggcatgatcaaccctcagggacccccatattccatgggtggaaccatggccaacaattctgcagggatggcagccagcccagagatgatgggccttggggatgtaaagttaactccagccaccaaaatgaacaacaaggcagatgggacacccaagacagaatccaaatccaagaaatccagttcttctactacaaccaatgagaagatcaccaagttgtatgagctgggtggtgagcctgagaggaagatgtgggtggaccgttatctggccttcactgaggagaaggccatgggcatgacaaatctgcctgctgtgggtaggaaacctctggacctctatcgcctctatgtgtctgtgaaggagattggtggattgactcaggtcaacaagaacaaaaaatggcgggaacttgcaaccaacctcaatgtgggcacatcaagcagtgctgccagctccttgaaaaagcagtatatccagtgtctctatgcctttgaatgcaagattgaacggggagaagaccctcccccagacatctttgcagctgctgattccaagaagtcccagcccaagatccagcctccctctcctgcgggatcaggatctatgcaggggccccagactccccagtcaaccagcagttccatggcagaaggaggagacttaaagccaccaactccagcatccacaccacacagtcagatccccccattgccaggcatgagcaggagcaattcagttgggatccaggatgcctttaatgatggaagtgactccacattccagaagcggaattccatgactccaaaccctgggtatcagcccagtatgaatacctctgacatgatggggcgcatgtcctatgagccaaataaggatccttatggcagcatgaggaaagctccagggagtgatcccttcatgtcctcagggcagggccccaacggcgggatgggtgacccctacagtcgtgctgccggccctgggctaggaaatgtggcgatgggaccacgacagcactatccctatggaggtccttatgacagagtgaggacggagcctggaatagggcctgagggaaacatgagcactggggccccacagccgaatctcatgccttccaacccagactcggggatgtattctcctagccgctaccccccgcagcagcagcagcagcagcagcaacgacatgattcctatggcaatcagttctccacccaaggcaccccttctggcagccccttccccagccagcagactacaatgtatcaacagcaacagcagaattacaagcggccaatggatggcacatatggccctcctgccaagcggcacgaaggggagatgtacagcgtgccatacagcactgggcaggggcagcctcagcagcagcagttgcccccagcccagccccagcctgccagccagcaacaagctgcccagccttcccctcagcaagatgtatacaaccagtatggcaatgcctatcctgccactgccacagctgctactgagcgccgaccagcaggcggcccccagaaccaatttccattccagtttggccgagaccgtgtctctgcaccccctggcaccaatgcccagcaaaacatgccaccacaaatgatgggcggccccatacaggcatcagctgaggttgctcagcaaggcaccatgtggcaggggcgtaatgacatgacctataattatgccaacaggcagagcacgggctctgccccccagggccccgcctatcatggcgtgaaccgaacagatgaaatgctgcacacagatcagagggccaaccacgaaggctcgtggccttcccatggcacacgccagcccccatatggtccctctgcccctgtgccccccatgacaaggccccctccatctaactaccagcccccaccaagcatgcagaatcacattcctcaggtatccagccctgctcccctgccccggccaatggagaaccgcacctctcctagcaagtctccattcctgcactctgggatgaaaatgcagaaggcaggtcccccagtacctgcctcgcacatagcacctgcccctgtgcagccccccatgattcggcgggatatcaccttcccacctggctctgttgaagccacacagcctgtgttgaagcagaggaggcggctcacaatgaaagacattggaaccccggaggcatggcgggtaatgatgtccctcaagtctggtctcctggcagagagcacatgggcattagataccatcaacatcctgctgtatgatgacaacagcatcatgaccttcaacctcagtcagctcccagggttgctagagctccttgtagaatatttccgacgatgcctgattgagatctttggcattttaaaggagtatgaggtgggtgacccaggacagagaacgctactggatcctgggaggttcagcaaggtgtctagtccagctcccatggagggtggggaagaagaagaagaacttctaggtcctaaactagaagaggaagaagaagaggaagtagttgaaaatgatgaggagatagccttttcaggcaaggacaagccagcttcagagaatagtgaggagaagctgatcagtaagtttgacaagcttccagtaaagatcgtacagaagaatgatccatttgtggtggactgctcagataagcttgggcgtgtgcaggagtttgacagtggcctgctgcactggcggattggtgggggggacaccactgagcatatccagacccacttcgagagcaagacagagctgctgccttcccggcctcacgcaccctgcccaccagcccctcggaagcatgtgacaacagcagagggtacaccagggacaacagaccaggaggggcccccacctgatggacctccagaaaaacggatcacagccactatggatgacatgttgtctactcggtctagcaccttgaccgaggatggagctaagagttcagaggccatcaaggagagcagcaagtttccatttggcattagcccagcacagagccaccggaacatcaagatcctagaggacgaaccccacagtaaggatgagaccccactgtgtacccttctggactggcaggattctcttgccaagcgctgcgtctgtgtgtccaataccattcgaagcctgtcatttgtgccaggcaatgactttgagatgtccaaacacccagggctgctgctcatcctgggcaagctgatcctgctgcaccacaagcacccagaacggaagcaggcaccactaacttatgaaaaggaggaggaacaggaccaaggggtgagctgcaacaaagtggagtggtggtgggactgcttggagatgctccgggaaaacaccttggttacactcgccaacatctcggggcagttggacctatctccataccccgagagcatttgcctgcctgtcctggacggactcctacactgggcagtttgcccttcagctgaagcccaggaccccttttccaccctgggccccaatgccgtcctttccccgcagagactggtcttggaaaccctcagcaaactcagcatccaggacaacaatgtggacctgattctggccacaccccccttcagccgcctggagaagttgtatagcactatggtgcgcttcctcagtgaccgaaagaacccggtgtgccgggagatggctgtggtactgctggccaacctggctcagggggacagcctggcagctcgtgccattgcagtgcagaagggcagtatcggcaacctcctgggcttcctagaggacagccttgccgccacacagttccagcagagccaggccagcctcctccacatgcagaacccaccctttgagccaactagtgtggacatgatgcggcgggctgcccgcgcgctgcttgccttggccaaggtggacgagaaccactcagagtttactctgtacgaatcacggctgttggacatctcggtatcaccgttgatgaactcattggtttcacaagtcatttgtgatgtactgtttttgattggccagtcatgacagccgtgggacacctcccccccccgtgtgtgtgtgcgtgtgtggagaacttagaaactgactgttgccctttatttatgcaaaaccacctcagaatccagtttaccctgtgctgtccagcttctcccttgggaaaaagtctctcctgtttctctctcctccttccacctcccctccctccatcacctcacgcctttctgttccttgtcctcaccttactcccctcaggaccctaccccaccctctttgaaaagacaaagctctgcctacatagaagactttttttattttaaccaaagttactgttgtttacagtgagtttggggaaaaaaaataaaataaaaatggctttcccagtccttgcatcaacgggatgccacatttcataactgtttttaatggtaaaaaaaaaaaaaaaaaatacaaaaaaaaattctgaaggacaaaaaaggtgactgctgaactgtgtgtggtttattgttgtacattcacaatcttgcaggagccaagaagttcgcagttgtgaacagaccctgttcactggagaggcctgtgcagtagagtgtagaccctttcatgtactgtactgtacacctgatactgtaaacatactgtaataataatgtctcacatggaaacagaaaacgctgggtcagcagcaagctgtagtttttaaaaatgtttttagttaaacgttgaggagaaaaaaaaaaaaggcttttcccccaaagtatcatgtgtgaacctacaacaccctgacctctttctctcctccttgattgtatgaataaccctgagatcacctcttagaactggttttaacctttagctgcagcggctacgctgccacgtgtgtatatatatgacgttgtacattgcacatacccttggatccccacagtttggtcctcctcccagctacccctttatagtatgacgagttaacaagttggtgacctgcacaaagcgagacacagctatttaatctcttgccagatatcgcccctcttggtgcgatgctgtacaggtctctgtaaaaagtccttgctgtctcagcagccaatcaacttatagtttatttttttctgggtttttgttttgttttgttttctttctaatcgaggtgtgaaaaagttctaggttcagttgaagttctgatgaagaaacacaattgagattttttcagtgataaaatctgcatatttgtatttcaacaatgtagctaaaacttgatgtaaattcctcctttttttccttttttggcttaatgaatatcatttattcagtatgaaatctttatactatatgttccacgtgttaagaataaatgtacattaaatcttggtaagacttt

SEQ ID NO: 65 - DNA, 8585 bp, Homo sapiens
cagaaagcggagagtcacagcggggccaggccctggggagcggagcctccaccgcccccctcattcccaggcaagggcttggggggaatgagccgggagagccgggtcccgagcctacagagccgggagcagctgagccgccggcgcctcggccgccgccgccgcctcctcctcctccgccgccgccagcccggagcctgagccggcggggcgggggggagaggagcgagcgcagcgcagcagcggagccccgcgaggcccgcccgggcgggtggggagggcagcccgggggactgggccccggggcggggtgggagggggggagaagacgaagacagggccgggtctctccgcggacgagacagcggggatcatggccgcgcaggtcgcccccgccgccgccagcagcctgggcaacccgccgccgccgccgccctcggagctgaagaaagccgagcagcagcagcgggaggaggcggggggcgaggcggcggcggcggcagcggccgagcgcggggaaatgaaggcagccgccgggcaggaaagcgagggccccgccgtggggccgccgcagccgctgggaaaggagctgcaggacggggccgagagcaatgggggtggcggcggcggcggagccggcagcggcggcgggcccggcgcggagccggacctgaagaactcgaacgggaacgcgggccctaggcccgccctgaacaataacctcacggagccgcccggcggcggcggtggcggcagcagcgatggggtgggggcgcctcctcactcagccgcggccgccttgccgcccccagcctacggcttcgggcaaccctacggccggagcccgtctgccgtcgccgccgccgcggccgccgtcttccaccaacaacatggcggacaacaaagccctggcctggcagcgctgcagagcggcggcggcgggggcctggagccctacgcggggccccagcagaactctcacgaccacggcttccccaaccaccagtacaactcctactaccccaaccgcagcgcctaccccccgcccgccccggcctacgcgctgagctccccgagaggtggcactccgggctccggcgcggcggcggctgccggctccaagccgcctccctcctccagcgcctccgcctcctcgtcgtcttcgtccttcgctcagcagcgcttcggggccatggggggaggcggcccctccgcggccggcgggggaactccccagcccaccgccacccccaccctcaaccaactgctcacgtcgcccagctcggcccggggctaccagggctaccccgggggcgactacagtggcgggccccaggacgggggcgccggcaagggcccggcggacatggcctcgcagtgttggggggctgcggcggcggcagctgcggcggcggccgcctcgggaggggcccaacaaaggagccaccacgcgcccatgagccccgggagcagcggcggcggggggcagccgctcgcccggacccctcagccatccagtccaatggatcagatgggcaagatgagacctcagccatatggcgggactaacccatactcgcagcaacagggacctccgtcaggaccgcagcaaggacatgggtacccagggcagccatacgggtcccagaccccgcagcggtacccgatgaccatgcagggccgggcgcagagtgccatgggcggcctctcttatacacagcagattcctccttatggacaacaaggccccagcgggtatggtcaacagggccagactccatattacaaccagcaaagtcctcaccctcagcagcagcagccaccctactcccagcaaccaccgtcccagacccctcatgcccaaccttcgtatcagcagcagccacagtctcaaccaccacagctccagtcctctcagcctccatactcccagcagccatcccagcctccacatcagcagtccccggctccatacccctcccagcagtcgacgacacagcagcacccccagagccagcccccctactcacagccacaggctcagtctccttaccagcagcagcaacctcagcagccagcaccctcgacgctctcccagcaggctgcgtatcctcagccccagtctcagcagtcccagcaaactgcctattcccagcagcgcttccctccaccgcaggagctatctcaagattcatttgggtctcaggcatcctcagccccctcaatgacctccagtaagggagggcaagaagatatgaacctgagccttcagtcaagaccctccagcttgcctgatctatctggttcaatagatgacctccccatggggacagaaggagctctgagtcctggagtgagcacatcagggatttccagcagccaaggagagcagagtaatccagctcagtctcctttctctcctcatacctcccctcacctgcctggcatccgaggcccttccccgtcccctgttggctctcccgccagtgttgctcagtctcgctcaggaccactctcgcctgctgcagtgccaggcaaccagatgccacctcggccacccagtggccagtcggacagcatcatgcatccttccatgaaccaatcaagcattgcccaagatcgaggttatatgcagaggaacccccagatgccccagtacagttccccccagcccggctcagccttatctccgcgtcagccttccggaggacagatacacacaggcatgggctcctaccagcagaactccatggggagctatggtccccaggggggtcagtatggcccacaaggtggctaccccaggcagccaaactataatgccttgcccaatgccaactaccccagtgcaggcatggctggaggcataaaccccatgggtgccggaggtcaaatgcatggacagcctggcatcccaccttatggcacactccctccagggaggatgagtcacgcctccatgggcaaccggccttatggccctaacatggccaatatgccacctcaggttgggtcagggatgtgtcccccaccagggggcatgaaccggaaaacccaagaaactgctgtcgccatgcatgttgctgccaactctatccaaaacaggccgccaggctaccccaatatgaatcaagggggcatgatgggaactggacctccttatggacaagggattaatagtatggctggcatgatcaaccctcagggacccccatattccatgggtggaaccatggccaacaattctgcagggatggcagccagcccagagatgatgggccttggggatgtaaagttaactccagccaccaaaatgaacaacaaggcagatgggacacccaagacagaatccaaatccaagaaatccagttcttctactacaaccaatgagaagatcaccaagttgtatgagctgggtggtgagcctgagaggaagatgtgggtggaccgttatctggccttcactgaggagaaggccatgggcatgacaaatctgcctgctgtgggtaggaaacctctggacctctatcgcctctatgtgtctgtgaaggagattggtggattgactcaggtcaacaagaacaaaaaatggcgggaacttgcaaccaacctcaatgtgggcacatcaagcagtgctgccagctccttgaaaaagcagtatatccagtgtctctatgcctttgaatgcaagattgaacggggagaagaccctcccccagacatctttgcagctgctgattccaagaagtcccagcccaagatccagcctccctctcctgcgggatcaggatctatgcaggggccccagactccccagtcaaccagcagttccatggcagaaggaggagacttaaagccaccaactccagcatccacaccacacagtcagatccccccattgccaggcatgagcaggagcaattcagttgggatccaggatgcctttaatgatggaagtgactccacattccagaagcggaattccatgactccaaaccctgggtatcagcccagtatgaatacctctgacatgatggggcgcatgtcctatgagccaaataaggatccttatggcagcatgaggaaagctccagggagtgatcccttcatgtcctcagggcagggccccaacggcgggatgggtgacccctacagtcgtgctgccggccctgggctaggaaatgtggcgatgggaccacgacagcactatccctatggaggtccttatgacagagtgaggacggagcctggaatagggcctgagggaaacatgagcactggggccccacagccgaatctcatgccttccaacccagactcggggatgtattctcctagccgctaccccccgcagcagcagcagcagcagcagcaacgacatgattcctatggcaatcagttctccacccaaggcaccccttctggcagccccttccccagccagcagactacaatgtatcaacagcaacagcagaattacaagcggccaatggatggcacatatggccctcctgccaagcggcacgaaggggagatgtacagcgtgccatacagcactgggcaggggcagcctcagcagcagcagttgcccccagcccagccccagcctgccagccagcaacaagctgcccagccttcccctcagcaagatgtatacaaccagtatggcaatgcctatcctgccactgccacagctgctactgagcgccgaccagcaggcggcccccagaaccaatttccattccagtttggccgagaccgtgtctctgcaccccctggcaccaatgcccagcaaaacatgccaccacaaatgatgggcggccccatacaggcatcagctgaggttgctcagcaaggcaccatgtggcaggggcgtaatgacatgacctataattatgccaacaggcagagcacgggctctgccccccagggccccgcctatcatggcgtgaaccgaacagatgaaatgctgcacacagatcagagggccaaccacgaaggctcgtggccttcccatggcacacgccagcccccatatggtccctctgcccctgtgccccccatgacaaggccccctccatctaactaccagcccccaccaagcatgcagaatcacattcctcaggtatccagccctgctcccctgccccggccaatggagaaccgcacctctcctagcaagtctccattcctgcactctgggatgaaaatgcagaaggcaggtcccccagtacctgcctcgcacatagcacctgcccctgtgcagccccccatgattcggcgggatatcaccttcccacctggctctgttgaagccacacagcctgtgttgaagcagaggaggcggctcacaatgaaagacattggaaccccggaggcatggcgggtaatgatgtccctcaagtctggtctcctggcagagagcacatgggcattagataccatcaacatcctgctgtatgatgacaacagcatcatgaccttcaacctcagtcagctcccagggttgctagagctccttgtagaatatttccgacgatgcctgattgagatctttggcattttaaaggagtatgaggtgggtgacccaggacagagaacgctactggatcctgggaggttcagcaaggtgtctagtccagctcccatggagggtggggaagaagaagaagaacttctaggtcctaaactagaagaggaagaagaagaggaagtagttgaaaatgatgaggagatagccttttcaggcaaggacaagccagcttcagagaatagtgaggagaagctgatcagtaagtttgacaagcttccagtaaagatcgtacagaagaatgatccatttgtggtggactgctcagataagcttgggcgtgtgcaggagtttgacagtggcctgctgcactggcggattggtgggggggacaccactgagcatatccagacccacttcgagagcaagacagagctgctgccttcccggcctcacgcaccctgcccaccagcccctcggaagcatgtgacaacagcagagggtacaccagggacaacagaccaggaggggcccccacctgatggacctccagaaaaacggatcacagccactatggatgacatgttgtctactcggtctagcaccttgaccgaggatggagctaagagttcagaggccatcaaggagagcagcaagtttccatttggcattagcccagcacagagccaccggaacatcaagatcctagaggacgaaccccacagtaaggatgagaccccactgtgtacccttctggactggcaggattctcttgccaagcgctgcgtctgtgtgtccaataccattcgaagcctgtcatttgtgccaggcaatgactttgagatgtccaaacacccagggctgctgctcatcctgggcaagctgatcctgctgcaccacaagcacccagaacggaagcaggcaccactaacttatgaaaaggaggaggaacaggaccaaggggtgagctgcaacaaagtggagtggtggtgggactgcttggagatgctccgggaaaacaccttggttacactcgccaacatctcggggcagttggacctatctccataccccgagagcatttgcctgcctgtcctggacggactcctacactgggcagtttgcccttcagctgaagcccagggccccttttccaccctgggccccaatgccgtcctttccccgcagagactggtcttggaaaccctcagcaaactcagcatccaggacaacaatgtggacctgattctggccacaccccccttcagccgcctggagaagttgtatagcactatggtgcgcttcctcagtgaccgaaagaacccggtgtgccgggagatggctgtggtactgctggccaacctggctcagggggacagcctggcagctcgtgccattgcagtgcagaagggcagtatcggcaacctcctgggcttcctagaggacagccttgccgccacacagttccagcagagccaggccagcctcctccacatgcagaacccaccctttgagccaactagtgtggacatgatgcggcgggctgcccgcgcgctgcttgccttggccaaggtggacgagaaccactcagagtttactctgtacgaatcacggctgttggacatctcggtatcaccgttgatgaactcattggtttcacaagtcatttgtgatgtactgtttttgattggccagtcatgacagccgtgggacacctcccccccccgtgtgtgtgtgcgtgtgtggagaacttagaaactgactgttgccctttatttatgcaaaaccacctcagaatccagtttaccctgtgctgtccagcttctcccttgggaaaaagtctctcctgtttctctctcctccttccacctcccctccctccatcacctcacgcctttctgttccttgtcctcaccttactcccctcaggaccctaccccaccctctttgaaaagacaaagctctgcctacatagaagactttttttattttaaccaaagttactgttgtttacagtgagtttggggaaaaaaaataaaataaaaatggctttcccagtccttgcatcaacgggatgccacatttcataactgtttttaatggtaaaaaaaaaaaaaaaaaatacaaaaaaaaattctgaaggacaaaaaaggtgactgctgaactgtgtgtggtttattgttgtacattcacaatcttgcaggagccaagaagttcgcagttgtgaacagaccctgttcactggagaggcctgtgcagtagagtgtagaccctttcatgtactgtactgtacacctgatactgtaaacatactgtaataataatgtctcacatggaaacagaaaacgctgggtcagcagcaagctgtagtttttaaaaatgtttttagttaaacgttgaggagaaaaaaaaaaaaggcttttcccccaaagtatcatgtgtgaacctacaacaccctgacctctttctctcctccttgattgtatgaataaccctgagatcacctcttagaactggttttaacctttagctgcagcggctacgctgccacgtgtgtatatatatgacgttgtacattgcacatacccttggatccccacagtttggtcctcctcccagctacccctttatagtatgacgagttaacaagttggtgacctgcacaaagcgagacacagctatttaatctcttgccagatatcgcccctcttggtgcgatgctgtacaggtctctgtaaaaagtccttgctgtctcagcagccaatcaacttatagtttatttttttctgggtttttgttttgttttgttttctttctaatcgaggtgtgaaaaagttctaggttcagttgaagttctgatgaagaaacacaattgagattttttcagtgataaaatctgcatatttgtatttcaacaatgtagctaaaacttgatgtaaattcctcctttttttccttttttggcttaatgaatatcatttattcagtatgaaatctttatactatatgttccacgtgttaagaataaatgtacattaaatcttggtaagacttt

SEQ ID NO: 66 - DNA, 8585 bp, Homo sapiens
cagaaagcggagagtcacagcggggccaggccctggggagcggagcctccaccgcccccctcattcccaggcaagggcttggggggaatgagccgggagagccgggtcccgagcctacagagccgggagcagctgagccgccggcgcctcggccgccgccgccgcctcctcctcctccgccgccgccagcccggagcctgagccggcggggcgggggggagaggagcgagcgcagcgcagcagcggagccccgcgaggcccgcccgggcgggtggggagggcagcccgggggactgggccccggggcggggtgggagggggggagaagacgaagacagggccgggtctctccgcggacgagacagcggggatcatggccgcgcaggtcgcccccgccgccgccagcagcctgggcaacccgccgccgccgccgccctcggagctgaagaaagccgagcagcagcagcgggaggaggcggggggcgaggcggcggcggcggcagcggccgagcgcggggaaatgaaggcagccgccgggcaggaaagcgagggccccgccgtggggccgccgcagccgctgggaaaggagctgcaggacggggccgagagcaatgggggtggcggcggcggcggagccggcagcggcggcgggcccggcgcggagccggacctgaagaactcgaacgggaacgcgggccctaggcccgccctgaacaataacctcacggagccgcccggcggcggcggtggcggcagcagcgatggggtgggggcgcctcctcactcagccgcggccgccttgccgcccccagcctacggcttcgggcaaccctacggccggagcccgtctgccgtcgccgccgccgcggccgccgtcttccaccaacaacatggcggacaacaaagccctggcctggcagcgctgcagagcggcggcggcgggggcctggagccctacgcggggccccagcagaactctcacgaccacggcttccccaaccaccagtacaactcctactaccccaaccgcagcgcctaccccccgcccgccccggcctacgcgctgagctccccgagaggtggcactccgggctccggcgcggcggcggctgccggctccaagccgcctccctcctccagcgcctccgcctcctcgtcgtcttcgtccttcgctcagcagcgcttcggggccatggggggaggcggcccctccgcggccggcgggggaactccccagcccaccgccacccccaccctcaaccaactgctcacgtcgcccagctcggcccggggctaccagggctaccccgggggcgactacagtggcgggccccaggacgggggcgccggcaagggcccggcggacatggcctcgcagtgttggggggctgcggcggcggcagctgcggcggcggccgcctcgggaggggcccaacaaaggagccaccacgcgcccatgagccccgggagcagcggcggcggggggcagccgctcgcccggacccctcagccatccagtccaatggatcagatgggcaagatgagacctcagccatatggcgggactaacccatactcgcagcaacagggacctccgtcaggaccgcagcaaggacatgggtacccagggcagccatacgggtcccagaccccgcagcggtacccgatgaccatgcagggccgggcgcagagtgccatgggcggcctctcttatacacagcagattcctccttatggacaacaaggccccagcgggtatggtcaacagggccagactccatattacaaccagcaaagtcctcaccctcagcagcagcagccaccctactcccagcaaccaccgtcccagacccctcatgcccaaccttcgtatcagcagcagccacagtctcaaccaccacagctccagtcctctcagcctccatactcccagcagccatcccagcctccacatcagcagtccccggctccatacccctcccagcagtcgacgacacagcagcacccccagagccagcccccctactcacagccacaggctcagtctccttaccagcagcagcaacctcagcagccagcaccctcgacgctctcccagcaggctgcgtatcctcagccccagtctcagcagtcccagcaaactgcctattcccagcagcgcttccctccaccgcaggagctatctcaagattcatttgggtctcaggcatcctcagccccctcaatgacctccagtaagggagggcaagaagatatgaacctgagccttcagtcaagaccctccagcttgcctgatctatctggttcaatagatgacctccccatggggacagaaggagctctgagtcctggagtgagcacatcagggatttccagcagccaaggagagcagagtaatccagctcagtctcctttctctcctcatacctcccctcacctgcctggcatccgaggcccttccccgtcccctgttggctctcccgccagtgttgctcagtctcgctcaggaccactctcgcctgctgcagtgccaggcaaccagatgccacctcggccacccagtggccagtcggacagcatcatgcatccttccatgaaccaatcaagcattgcccaagatcgaggttatatgcagaggaacccccagatgccccagtacagttccccccagcccggctcagccttatctccgcgtcagccttccggaggacagatacacacaggcatgggctcctaccagcagaactccatggggagctatggtccccaggggggtcagtatggcccacaaggtggctaccccaggcagccaaactataatgccttgcccaatgccaactaccccagtgcaggcatggctggaggcataaaccccatgggtgccggaggtcaaatgcatggacagcctggcatcccaccttatggcacactccctccagggaggatgagtcacgcctccatgggcaaccggccttatggccctaacatggccaatatgccacctcaggttgggtcagggatgtgtcccccaccagggggcatgaaccggaaaacccaagaaactgctgtcgccatgcatgttgctgccaactctatccaaaacaggccgccaggctaccccaatatgaatcaagggggcatgatgggaactggacctccttatggacaagggattaatagtatggctggcatgatcaaccctcagggacccccatattccatgggtggaaccatggccaacaattctgcagggatggcagccagcccagagatgatgggccttggggatgtaaagttaactccagccaccaaaatgaacaacaaggcagatgggacacccaagacagaatccaaatccaagaaatccagttcttctactacaaccaatgagaagatcaccaagttgtatgagctgggtggtgagcctgagaggaagatgtgggtggaccgttatctggccttcactgaggagaaggccatgggcatgacaaatctgcctgctgtgggtaggaaacctctggacctctatcgcctctatgtgtctgtgaaggagattggtggattgactcaggtcaacaagaacaaaaaatggcgggaacttgcaaccaacctcaatgtgggcacatcaagcagtgctgccagctccttgaaaaagcagtatatccagtgtctctatgcctttgaatgcaagattgaacggggagaagaccctcccccagacatctttgcagctgctgattccaagaagtcccagcccaagatccagcctccctctcctgcgggatcaggatctatgcaggggccccagactccccagtcaaccagcagttccatggcagaaggaggagacttaaagccaccaactccagcatccacaccacacagtcagatccccccattgccaggcatgagcaggagcaattcagttgggatccaggatgcctttaatgatggaagtgactccacattccagaagcggaattccatgactccaaaccctgggtatcagcccagtatgaatacctctgacatgatggggcgcatgtcctatgagccaaataaggatccttatggcagcatgaggaaagctccagggagtgatcccttcatgtcctcagggcagggccccaacggcgggatgggtgacccctacagtcgtgctgccggccctgggctaggaaatgtggcgatgggaccacgacagcactatccctatggaggtccttatgacagagtgaggacggagcctggaatagggcctgagggaaacatgagcactggggccccacagccgaatctcatgccttccaacccagactcggggatgtattctcctagccgctaccccccgcagcagcagcagcagcagcagcaacgacatgattcctatggcaatcagttctccacccaaggcaccccttctggcagccccttccccagccagcagactacaatgtatcaacagcaacagcagaattacaagcggccaatggatggcacatatggccctcctgccaagcggcacgaaggggagatgtacagcgtgccatacagcactgggcaggggcagcctcagcagcagcagttgcccccagcccagccccagcctgccagccagcaacaagctgcccagccttcccctcagcaagatgtatacaaccagtatggcaatgcctatcctgccactgccacagctgctactgagcgccgaccagcaggcggcccccagaaccaatttccattccagtttggccgagaccgtgtctctgcaccccctggcaccaatgcccagcaaaacatgccaccacaaatgatgggcggccccatacaggcatcagctgaggttgctcagcaaggcaccatgtggcaggggcgtaatgacatgacctataattatgccaacaggcagagcacgggctctgccccccagggccccgcctatcatggcgtgaaccgaacagatgaaatgctgcacacagatcagagggccaaccacgaaggctcgtggccttcccatggcacacgccagcccccatatggtccctctgcccctgtgccccccatgacaaggccccctccatctaactaccagcccccaccaagcatgcagaatcacattcctcaggtatccagccctgctcccctgccccggccaatggagaaccgcacctctcctagcaagtctccattcctgcactctgggatgaaaatgcagaaggcaggtcccccagtacctgcctcgcacatagcacctgcccctgtgcagccccccatgattcggcgggatatcaccttcccacctggctctgttgaagccacacagcctgtgttgaagcagaggaggcggctcacaatgaaagacattggaaccccggaggcatggcgggtaatgatgtccctcaagtctggtctcctggcagagagcacatgggcattagataccatcaacatcctgctgtatgatgacaacagcatcatgaccttcaacctcagtcagctcccagggttgctagagctccttgtagaatatttccgacgatgcctgattgagatctttggcattttaaaggagtatgaggtgggtgacccaggacagagaacgctactggatcctgggaggttcagcaaggtgtctagtccagctcccatggagggtggggaagaagaagaagaacttctaggtcctaaactagaagaggaagaagaagaggaagtagttgaaaatgatgaggagatagccttttcaggcaaggacaagccagcttcagagaatagtgaggagaagctgatcagtaagtttgacaagcttccagtaaagatcgtacagaagaatgatccatttgtggtggactgctcagataagcttgggcgtgtgcaggagtttgacagtggcctgctgcactggcggattggtgggggggacaccactgagcatatccagacccacttcgagagcaagacagagctgctgccttcccggcctcacgcaccctgcccaccagcccctcggaagcatgtgacaacagcagagggtacaccagggacaacagaccaggaggggcccccacctgatggacctccagaaaaacggatcacagccactatggatgacatgttgtctactcggtctagcaccttgaccgaggatggagctaagagttcagaggccatcaaggagagcagcaagtttccatttggcattagcccagcacagagccaccggaacatcaagatcctagaggacgaaccccacagtaaggatgagaccccactgtgtacccttctggactggcaggattctcttgccaagcgctgcgtctgtgtgtccaataccattcgaagcctgtcatttgtgccaggcaatgactttgagatgtccaaacacccagggctgctgctcatcctgggcaagctgatcctgctgcaccacaagcacccagaacggaagcaggcaccactaacttatgaaaaggaggaggaacaggaccaaggggtgagctgcaacaaagtggagtggtggtgggactgcttggagatgctccgggaaaacaccttggttacactcgccaacatctcggggcagttggacctatctccataccccgagagcatttgcctgcctgtcctggacggactcctacactgggcagtttgcccttcagctgaagcccaggaccccttttccaccctgggccccaatgccgtcctttccccgcagagactggtcttggaaaccctcagcaaactcagcatccaggacaacaatgtggacctgattctggccacaccccccttcagccgcctggagaagttgtatagcactatggtgcgcttcctcagtgaccgaaagaacccggtgtgccgggagatggctgtggtactgctggccaacctggctcagggggacagcctggcagctcgtgccattgcagtgcagaagggcagtatcggcaacctcctgggcttcctagaggacagccttgccgccacacagttccagcagagccaggccagcctcctccacatgtagaacccaccctttgagccaactagtgtggacatgatgcggcgggctgcccgcgcgctgcttgccttggccaaggtggacgagaaccactcagagtttactctgtacgaatcacggctgttggacatctcggtatcaccgttgatgaactcattggtttcacaagtcatttgtgatgtactgtttttgattggccagtcatgacagccgtgggacacctcccccccccgtgtgtgtgtgcgtgtgtggagaacttagaaactgactgttgccctttatttatgcaaaaccacctcagaatccagtttaccctgtgctgtccagcttctcccttgggaaaaagtctctcctgtttctctctcctccttccacctcccctccctccatcacctcacgcctttctgttccttgtcctcaccttactcccctcaggaccctaccccaccctctttgaaaagacaaagctctgcctacatagaagactttttttattttaaccaaagttactgttgtttacagtgagtttggggaaaaaaaataaaataaaaatggctttcccagtccttgcatcaacgggatgccacatttcataactgtttttaatggtaaaaaaaaaaaaaaaaaatacaaaaaaaaattctgaaggacaaaaaaggtgactgctgaactgtgtgtggtttattgttgtacattcacaatcttgcaggagccaagaagttcgcagttgtgaacagaccctgttcactggagaggcctgtgcagtagagtgtagaccctttcatgtactgtactgtacacctgatactgtaaacatactgtaataataatgtctcacatggaaacagaaaacgctgggtcagcagcaagctgtagtttttaaaaatgtttttagttaaacgttgaggagaaaaaaaaaaaaggcttttcccccaaagtatcatgtgtgaacctacaacaccctgacctctttctctcctccttgattgtatgaataaccctgagatcacctcttagaactggttttaacctttagctgcagcggctacgctgccacgtgtgtatatatatgacgttgtacattgcacatacccttggatccccacagtttggtcctcctcccagctacccctttatagtatgacgagttaacaagttggtgacctgcacaaagcgagacacagctatttaatctcttgccagatatcgcccctcttggtgcgatgctgtacaggtctctgtaaaaagtccttgctgtctcagcagccaatcaacttatagtttatttttttctgggtttttgttttgttttgttttctttctaatcgaggtgtgaaaaagttctaggttcagttgaagttctgatgaagaaacacaattgagattttttcagtgataaaatctgcatatttgtatttcaacaatgtagctaaaacttgatgtaaattcctcctttttttccttttttggcttaatgaatatcatttattcagtatgaaatctttatactatatgttccacgtgttaagaataaatgtacattaaatcttggtaagacttt

SEQ ID NO: 67 - DNA, 8586 bp, Homo sapiens
cagaaagcggagagtcacagcggggccaggccctggggagcggagcctccaccgcccccctcattcccaggcaagggcttggggggaatgagccgggagagccgggtcccgagcctacagagccgggagcagctgagccgccggcgcctcggccgccgccgccgcctcctcctcctccgccgccgccagcccggagcctgagccggcggggcgggggggagaggagcgagcgcagcgcagcagcggagccccgcgaggcccgcccgggcgggtggggagggcagcccgggggactgggccccggggcggggtgggagggggggagaagacgaagacagggccgggtctctccgcggacgagacagcggggatcatggccgcgcaggtcgcccccgccgccgccagcagcctgggcaacccgccgccgccgccgccctcggagctgaagaaagccgagcagcagcagcgggaggaggcggggggcgaggcggcggcggcggcagcggccgagcgcggggaaatgaaggcagccgccgggcaggaaagcgagggccccgccgtggggccgccgcagccgctgggaaaggagctgcaggacggggccgagagcaatgggggtggcggcggcggcggagccggcagcggcggcgggcccggcgcggagccggacctgaagaactcgaacgggaacgcgggccctaggcccgccctgaacaataacctcacggagccgcccggcggcggcggtggcggcagcagcgatggggtgggggcgcctcctcactcagccgcggccgccttgccgcccccagcctacggcttcgggcaaccctacggccggagcccgtctgccgtcgccgccgccgcggccgccgtcttccaccaacaacatggcggacaacaaagccctggcctggcagcgctgcagagcggcggcggcgggggcctggagccctacgcggggccccagcagaactctcacgaccacggcttccccaaccaccagtacaactcctactaccccaaccgcagcgcctaccccccgcccgccccggcctacgcgctgagctccccgagaggtggcactccgggctccggcgcggcggcggctgccggctccaagccgcctccctcctccagcgcctccgcctcctcgtcgtcttcgtccttcgctcagcagcgcttcggggccatggggggaggcggcccctccgcggccggcgggggaactccccagcccaccgccacccccaccctcaaccaactgctcacgtcgcccagctcggcccggggctaccagggctaccccgggggcgactacagtggcgggccccaggacgggggcgccggcaagggcccggcggacatggcctcgcagtgttggggggctgcggcggcggcagctgcggcggcggccgcctcgggaggggcccaacaaaggagccaccacgcgcccatgagccccgggagcagcggcggcggggggcagccgctcgcccggacccctcagccatccagtccaatggatcagatgggcaagatgagacctcagccatatggcgggactaacccatactcgcagcaacagggacctccgtcaggaccgcagcaaggacatgggtacccagggcagccatacgggtcccagaccccgcagcggtacccgatgaccatgcagggccgggcgcagagtgccatgggcggcctctcttatacacagcagattcctccttatggacaacaaggccccagcgggtatggtcaacagggccagactccatattacaaccagcaaagtcctcaccctcagcagcagcagccaccctactcccagcaaccaccgtcccagacccctcatgcccaaccttcgtatcagcagcagccacagtctcaaccaccacagctccagtcctctcagcctccatactcccagcagccatcccagcctccacatcagcagtccccggctccatacccctcccagcagtcgacgacacagcagcacccccagagccagcccccctactcacagccacaggctcagtctccttaccagcagcagcaacctcagcagccagcaccctcgacgctctcccagcaggctgcgtatcctcagccccagtctcagcagtcccagcaaactgcctattcccagcagcgcttccctccaccgcaggagctatctcaagattcatttgggtctcaggcatcctcagccccctcaatgacctccagtaagggagggcaagaagatatgaacctgagccttcagtcaagaccctccagcttgcctgatctatctggttcaatagatgacctccccatggggacagaaggagctctgagtcctggagtgagcacatcagggatttccagcagccaaggagagcagagtaatccagctcagtctcctttctctcctcatacctcccctcacctgcctggcatccgaggcccttccccgtcccctgttggctctcccgccagtgttgctcagtctcgctcaggaccactctcgcctgctgcagtgccaggcaaccagatgccacctcggccacccagtggccagtcggacagcatcatgcatccttccatgaaccaatcaagcattgcccaagatcgaggttatatgcagaggaacccccagatgccccagtacagttccccccagcccggctcagccttatctccgcgtcagccttccggaggacagatacacacaggcatgggctcctaccagcagaactccatggggagctatggtccccaggggggtcagtatggcccacaaggtggctaccccaggcagccaaactataatgccttgcccaatgccaactaccccagtgcaggcatggctggaggcataaaccccatgggtgccggaggtcaaatgcatggacagcctggcatcccaccttatggcacactccctccagggaggatgagtcacgcctccatgggcaaccggccttatggccctaacatggccaatatgccacctcaggttgggtcagggatgtgtcccccaccagggggcatgaaccggaaaacccaagaaactgctgtcgccatgcatgttgctgccaactctatccaaaacaggccgccaggctaccccaatatgaatcaagggggcatgatgggaactggacctccttatggacaagggattaatagtatggctggcatgatcaaccctcagggacccccatattccatgggtggaaccatggccaacaattctgcagggatggcagccagcccagagatgatgggccttgggggatgtaaagttaactccagccaccaaaatgaacaacaaggcagatgggacacccaagacagaatccaaatccaagaaatccagttcttctactacaaccaatgagaagatcaccaagttgtatgagctgggtggtgagcctgagaggaagatgtgggtggaccgttatctggccttcactgaggagaaggccatgggcatgacaaatctgcctgctgtgggtaggaaacctctggacctctatcgcctctatgtgtctgtgaaggagattggtggattgactcaggtcaacaagaacaaaaaatggcgggaacttgcaaccaacctcaatgtgggcacatcaagcagtgctgccagctccttgaaaaagcagtatatccagtgtctctatgcctttgaatgcaagattgaacggggagaagaccctcccccagacatctttgcagctgctgattccaagaagtcccagcccaagatccagcctccctctcctgcgggatcaggatctatgcaggggccccagactccccagtcaaccagcagttccatggcagaaggaggagacttaaagccaccaactccagcatccacaccacacagtcagatccccccattgccaggcatgagcaggagcaattcagttgggatccaggatgcctttaatgatggaagtgactccacattccagaagcggaattccatgactccaaaccctgggtatcagcccagtatgaatacctctgacatgatggggcgcatgtcctatgagccaaataaggatccttatggcagcatgaggaaagctccagggagtgatcccttcatgtcctcagggcagggccccaacggcgggatgggtgacccctacagtcgtgctgccggccctgggctaggaaatgtggcgatgggaccacgacagcactatccctatggaggtccttatgacagagtgaggacggagcctggaatagggcctgagggaaacatgagcactggggccccacagccgaatctcatgccttccaacccagactcggggatgtattctcctagccgctaccccccgcagcagcagcagcagcagcagcaacgacatgattcctatggcaatcagttctccacccaaggcaccccttctggcagccccttccccagccagcagactacaatgtatcaacagcaacagcagaattacaagcggccaatggatggcacatatggccctcctgccaagcggcacgaaggggagatgtacagcgtgccatacagcactgggcaggggcagcctcagcagcagcagttgcccccagcccagccccagcctgccagccagcaacaagctgcccagccttcccctcagcaagatgtatacaaccagtatggcaatgcctatcctgccactgccacagctgctactgagcgccgaccagcaggcggcccccagaaccaatttccattccagtttggccgagaccgtgtctctgcaccccctggcaccaatgcccagcaaaacatgccaccacaaatgatgggcggccccatacaggcatcagctgaggttgctcagcaaggcaccatgtggcaggggcgtaatgacatgacctataattatgccaacaggcagagcacgggctctgccccccagggccccgcctatcatggcgtgaaccgaacagatgaaatgctgcacacagatcagagggccaaccacgaaggctcgtggccttcccatggcacacgccagcccccatatggtccctctgcccctgtgccccccatgacaaggccccctccatctaactaccagcccccaccaagcatgcagaatcacattcctcaggtatccagccctgctcccctgccccggccaatggagaaccgcacctctcctagcaagtctccattcctgcactctgggatgaaaatgcagaaggcaggtcccccagtacctgcctcgcacatagcacctgcccctgtgcagccccccatgattcggcgggatatcaccttcccacctggctctgttgaagccacacagcctgtgttgaagcagaggaggcggctcacaatgaaagacattggaaccccggaggcatggcgggtaatgatgtccctcaagtctggtctcctggcagagagcacatgggcattagataccatcaacatcctgctgtatgatgacaacagcatcatgaccttcaacctcagtcagctcccagggttgctagagctccttgtagaatatttccgacgatgcctgattgagatctttggcattttaaaggagtatgaggtgggtgacccaggacagagaacgctactggatcctgggaggttcagcaaggtgtctagtccagctcccatggagggtggggaagaagaagaagaacttctaggtcctaaactagaagaggaagaagaagaggaagtagttgaaaatgatgaggagatagccttttcaggcaaggacaagccagcttcagagaatagtgaggagaagctgatcagtaagtttgacaagcttccagtaaagatcgtacagaagaatgatccatttgtggtggactgctcagataagcttgggcgtgtgcaggagtttgacagtggcctgctgcactggcggattggtgggggggacaccactgagcatatccagacccacttcgagagcaagacagagctgctgccttcccggcctcacgcaccctgcccaccagcccctcggaagcatgtgacaacagcagagggtacaccagggacaacagaccaggaggggcccccacctgatggacctccagaaaaacggatcacagccactatggatgacatgttgtctactcggtctagcaccttgaccgaggatggagctaagagttcagaggccatcaaggagagcagcaagtttccatttggcattagcccagcacagagccaccggaacatcaagatcctagaggacgaaccccacagtaaggatgagaccccactgtgtacccttctggactggcaggattctcttgccaagcgctgcgtctgtgtgtccaataccattcgaagcctgtcatttgtgccaggcaatgactttgagatgtccaaacacccagggctgctgctcatcctgggcaagctgatcctgctgcaccacaagcacccagaacggaagcaggcaccactaacttatgaaaaggaggaggaacaggaccaaggggtgagctgcaacaaagtggagtggtggtgggactgcttggagatgctccgggaaaacaccttggttacactcgccaacatctcggggcagttggacctatctccataccccgagagcatttgcctgcctgtcctggacggactcctacactgggcagtttgcccttcagctgaagcccaggaccccttttccaccctgggccccaatgccgtcctttccccgcagagactggtcttggaaaccctcagcaaactcagcatccaggacaacaatgtggacctgattctggccacaccccccttcagccgcctggagaagttgtatagcactatggtgcgcttcctcagtgaccgaaagaacccggtgtgccgggagatggctgtggtactgctggccaacctggctcagggggacagcctggcagctcgtgccattgcagtgcagaagggcagtatcggcaacctcctgggcttcctagaggacagccttgccgccacacagttccagcagagccaggccagcctcctccacatgcagaacccaccctttgagccaactagtgtggacatgatgcggcgggctgcccgcgcgctgcttgccttggccaaggtggacgagaaccactcagagtttactctgtacgaatcacggctgttggacatctcggtatcaccgttgatgaactcattggtttcacaagtcatttgtgatgtactgtttttgattggccagtcatgacagccgtgggacacctcccccccccgtgtgtgtgtgcgtgtgtggagaacttagaaactgactgttgccctttatttatgcaaaaccacctcagaatccagtttaccctgtgctgtccagcttctcccttgggaaaaagtctctcctgtttctctctcctccttccacctcccctccctccatcacctcacgcctttctgttccttgtcctcaccttactcccctcaggaccctaccccaccctctttgaaaagacaaagctctgcctacatagaagactttttttattttaaccaaagttactgttgtttacagtgagtttggggaaaaaaaataaaataaaaatggctttcccagtccttgcatcaacgggatgccacatttcataactgtttttaatggtaaaaaaaaaaaaaaaaaatacaaaaaaaaattctgaaggacaaaaaaggtgactgctgaactgtgtgtggtttattgttgtacattcacaatcttgcaggagccaagaagttcgcagttgtgaacagaccctgttcactggagaggcctgtgcagtagagtgtagaccctttcatgtactgtactgtacacctgatactgtaaacatactgtaataataatgtctcacatggaaacagaaaacgctgggtcagcagcaagctgtagtttttaaaaatgtttttagttaaacgttgaggagaaaaaaaaaaaaggcttttcccccaaagtatcatgtgtgaacctacaacaccctgacctctttctctcctccttgattgtatgaataaccctgagatcacctcttagaactggttttaacctttagctgcagcggctacgctgccacgtgtgtatatatatgacgttgtacattgcacatacccttggatccccacagtttggtcctcctcccagctacccctttatagtatgacgagttaacaagttggtgacctgcacaaagcgagacacagctatttaatctcttgccagatatcgcccctcttggtgcgatgctgtacaggtctctgtaaaaagtccttgctgtctcagcagccaatcaacttatagtttatttttttctgggtttttgttttgttttgttttctttctaatcgaggtgtgaaaaagttctaggttcagttgaagttctgatgaagaaacacaattgagattttttcagtgataaaatctgcatatttgtatttcaacaatgtagctaaaacttgatgtaaattcctcctttttttccttttttggcttaatgaatatcatttattcagtatgaaatctttatactatatgttccacgtgttaagaataaatgtacattaaatcttggtaagacttt

SEQ ID NO: 68 - DNA, 8585 bp, Homo sapiens
cagaaagcggagagtcacagcggggccaggccctggggagcggagcctccaccgcccccctcattcccaggcaagggcttggggggaatgagccgggagagccgggtcccgagcctacagagccgggagcagctgagccgccggcgcctcggccgccgccgccgcctcctcctcctccgccgccgccagcccggagcctgagccggcggggcgggggggagaggagcgagcgcagcgcagcagcggagccccgcgaggcccgcccgggcgggtggggagggcagcccgggggactgggccccggggcggggtgggagggggggagaagacgaagacagggccgggtctctccgcggacgagacagcggggatcatggccgcgcaggtcgcccccgccgccgccagcagcctgggcaacccgccgccgccgccgccctcggagctgaagaaagccgagcagcagcagcgggaggaggcggggggcgaggcggcggcggcggcagcggccgagcgcggggaaatgaaggcagccgccgggcaggaaagcgagggccccgccgtggggccgccgcagccgctgggaaagtagctgcaggacggggccgagagcaatgggggtggcggcggcggcggagccggcagcggcggcgggcccggcgcggagccggacctgaagaactcgaacgggaacgcgggccctaggcccgccctgaacaataacctcacggagccgcccggcggcggcggtggcggcagcagcgatggggtgggggcgcctcctcactcagccgcggccgccttgccgcccccagcctacggcttcgggcaaccctacggccggagcccgtctgccgtcgccgccgccgcggccgccgtcttccaccaacaacatggcggacaacaaagccctggcctggcagcgctgcagagcggcggcggcgggggcctggagccctacgcggggccccagcagaactctcacgaccacggcttccccaaccaccagtacaactcctactaccccaaccgcagcgcctaccccccgcccgccccggcctacgcgctgagctccccgagaggtggcactccgggctccggcgcggcggcggctgccggctccaagccgcctccctcctccagcgcctccgcctcctcgtcgtcttcgtccttcgctcagcagcgcttcggggccatggggggaggcggcccctccgcggccggcgggggaactccccagcccaccgccacccccaccctcaaccaactgctcacgtcgcccagctcggcccggggctaccagggctaccccgggggcgactacagtggcgggccccaggacgggggcgccggcaagggcccggcggacatggcctcgcagtgttggggggctgcggcggcggcagctgcggcggcggccgcctcgggaggggcccaacaaaggagccaccacgcgcccatgagccccgggagcagcggcggcggggggcagccgctcgcccggacccctcagccatccagtccaatggatcagatgggcaagatgagacctcagccatatggcgggactaacccatactcgcagcaacagggacctccgtcaggaccgcagcaaggacatgggtacccagggcagccatacgggtcccagaccccgcagcggtacccgatgaccatgcagggccgggcgcagagtgccatgggcggcctctcttatacacagcagattcctccttatggacaacaaggccccagcgggtatggtcaacagggccagactccatattacaaccagcaaagtcctcaccctcagcagcagcagccaccctactcccagcaaccaccgtcccagacccctcatgcccaaccttcgtatcagcagcagccacagtctcaaccaccacagctccagtcctctcagcctccatactcccagcagccatcccagcctccacatcagcagtccccggctccatacccctcccagcagtcgacgacacagcagcacccccagagccagcccccctactcacagccacaggctcagtctccttaccagcagcagcaacctcagcagccagcaccctcgacgctctcccagcaggctgcgtatcctcagccccagtctcagcagtcccagcaaactgcctattcccagcagcgcttccctccaccgcaggagctatctcaagattcatttgggtctcaggcatcctcagccccctcaatgacctccagtaagggagggcaagaagatatgaacctgagccttcagtcaagaccctccagcttgcctgatctatctggttcaatagatgacctccccatggggacagaaggagctctgagtcctggagtgagcacatcagggatttccagcagccaaggagagcagagtaatccagctcagtctcctttctctcctcatacctcccctcacctgcctggcatccgaggcccttccccgtcccctgttggctctcccgccagtgttgctcagtctcgctcaggaccactctcgcctgctgcagtgccaggcaaccagatgccacctcggccacccagtggccagtcggacagcatcatgcatccttccatgaaccaatcaagcattgcccaagatcgaggttatatgcagaggaacccccagatgccccagtacagttccccccagcccggctcagccttatctccgcgtcagccttccggaggacagatacacacaggcatgggctcctaccagcagaactccatggggagctatggtccccaggggggtcagtatggcccacaaggtggctaccccaggcagccaaactataatgccttgcccaatgccaactaccccagtgcaggcatggctggaggcataaaccccatgggtgccggaggtcaaatgcatggacagcctggcatcccaccttatggcacactccctccagggaggatgagtcacgcctccatgggcaaccggccttatggccctaacatggccaatatgccacctcaggttgggtcagggatgtgtcccccaccagggggcatgaaccggaaaacccaagaaactgctgtcgccatgcatgttgctgccaactctatccaaaacaggccgccaggctaccccaatatgaatcaagggggcatgatgggaactggacctccttatggacaagggattaatagtatggctggcatgatcaaccctcagggacccccatattccatgggtggaaccatggccaacaattctgcagggatggcagccagcccagagatgatgggccttggggatgtaaagttaactccagccaccaaaatgaacaacaaggcagatgggacacccaagacagaatccaaatccaagaaatccagttcttctactacaaccaatgagaagatcaccaagttgtatgagctgggtggtgagcctgagaggaagatgtgggtggaccgttatctggccttcactgaggagaaggccatgggcatgacaaatctgcctgctgtgggtaggaaacctctggacctctatcgcctctatgtgtctgtgaaggagattggtggattgactcaggtcaacaagaacaaaaaatggcgggaacttgcaaccaacctcaatgtgggcacatcaagcagtgctgccagctccttgaaaaagcagtatatccagtgtctctatgcctttgaatgcaagattgaacggggagaagaccctcccccagacatctttgcagctgctgattccaagaagtcccagcccaagatccagcctccctctcctgcgggatcaggatctatgcaggggccccagactccccagtcaaccagcagttccatggcagaaggaggagacttaaagccaccaactccagcatccacaccacacagtcagatccccccattgccaggcatgagcaggagcaattcagttgggatccaggatgcctttaatgatggaagtgactccacattccagaagcggaattccatgactccaaaccctgggtatcagcccagtatgaatacctctgacatgatggggcgcatgtcctatgagccaaataaggatccttatggcagcatgaggaaagctccagggagtgatcccttcatgtcctcagggcagggccccaacggcgggatgggtgacccctacagtcgtgctgccggccctgggctaggaaatgtggcgatgggaccacgacagcactatccctatggaggtccttatgacagagtgaggacggagcctggaatagggcctgagggaaacatgagcactggggccccacagccgaatctcatgccttccaacccagactcggggatgtattctcctagccgctaccccccgcagcagcagcagcagcagcagcaacgacatgattcctatggcaatcagttctccacccaaggcaccccttctggcagccccttccccagccagcagactacaatgtatcaacagcaacagcagaattacaagcggccaatggatggcacatatggccctcctgccaagcggcacgaaggggagatgtacagcgtgccatacagcactgggcaggggcagcctcagcagcagcagttgcccccagcccagccccagcctgccagccagcaacaagctgcccagccttcccctcagcaagatgtatacaaccagtatggcaatgcctatcctgccactgccacagctgctactgagcgccgaccagcaggcggcccccagaaccaatttccattccagtttggccgagaccgtgtctctgcaccccctggcaccaatgcccagcaaaacatgccaccacaaatgatgggcggccccatacaggcatcagctgaggttgctcagcaaggcaccatgtggcaggggcgtaatgacatgacctataattatgccaacaggcagagcacgggctctgccccccagggccccgcctatcatggcgtgaaccgaacagatgaaatgctgcacacagatcagagggccaaccacgaaggctcgtggccttcccatggcacacgccagcccccatatggtccctctgcccctgtgccccccatgacaaggccccctccatctaactaccagcccccaccaagcatgcagaatcacattcctcaggtatccagccctgctcccctgccccggccaatggagaaccgcacctctcctagcaagtctccattcctgcactctgggatgaaaatgcagaaggcaggtcccccagtacctgcctcgcacatagcacctgcccctgtgcagccccccatgattcggcgggatatcaccttcccacctggctctgttgaagccacacagcctgtgttgaagcagaggaggcggctcacaatgaaagacattggaaccccggaggcatggcgggtaatgatgtccctcaagtctggtctcctggcagagagcacatgggcattagataccatcaacatcctgctgtatgatgacaacagcatcatgaccttcaacctcagtcagctcccagggttgctagagctccttgtagaatatttccgacgatgcctgattgagatctttggcattttaaaggagtatgaggtgggtgacccaggacagagaacgctactggatcctgggaggttcagcaaggtgtctagtccagctcccatggagggtggggaagaagaagaagaacttctaggtcctaaactagaagaggaagaagaagaggaagtagttgaaaatgatgaggagatagccttttcaggcaaggacaagccagcttcagagaatagtgaggagaagctgatcagtaagtttgacaagcttccagtaaagatcgtacagaagaatgatccatttgtggtggactgctcagataagcttgggcgtgtgcaggagtttgacagtggcctgctgcactggcggattggtgggggggacaccactgagcatatccagacccacttcgagagcaagacagagctgctgccttcccggcctcacgcaccctgcccaccagcccctcggaagcatgtgacaacagcagagggtacaccagggacaacagaccaggaggggcccccacctgatggacctccagaaaaacggatcacagccactatggatgacatgttgtctactcggtctagcaccttgaccgaggatggagctaagagttcagaggccatcaaggagagcagcaagtttccatttggcattagcccagcacagagccaccggaacatcaagatcctagaggacgaaccccacagtaaggatgagaccccactgtgtacccttctggactggcaggattctcttgccaagcgctgcgtctgtgtgtccaataccattcgaagcctgtcatttgtgccaggcaatgactttgagatgtccaaacacccagggctgctgctcatcctgggcaagctgatcctgctgcaccacaagcacccagaacggaagcaggcaccactaacttatgaaaaggaggaggaacaggaccaaggggtgagctgcaacaaagtggagtggtggtgggactgcttggagatgctccgggaaaacaccttggttacactcgccaacatctcggggcagttggacctatctccataccccgagagcatttgcctgcctgtcctggacggactcctacactgggcagtttgcccttcagctgaagcccaggaccccttttccaccctgggccccaatgccgtcctttccccgcagagactggtcttggaaaccctcagcaaactcagcatccaggacaacaatgtggacctgattctggccacaccccccttcagccgcctggagaagttgtatagcactatggtgcgcttcctcagtgaccgaaagaacccggtgtgccgggagatggctgtggtactgctggccaacctggctcagggggacagcctggcagctcgtgccattgcagtgcagaagggcagtatcggcaacctcctgggcttcctagaggacagccttgccgccacacagttccagcagagccaggccagcctcctccacatgcagaacccaccctttgagccaactagtgtggacatgatgcggcgggctgcccgcgcgctgcttgccttggccaaggtggacgagaaccactcagagtttactctgtacgaatcacggctgttggacatctcggtatcaccgttgatgaactcattggtttcacaagtcatttgtgatgtactgtttttgattggccagtcatgacagccgtgggacacctcccccccccgtgtgtgtgtgcgtgtgtggagaacttagaaactgactgttgccctttatttatgcaaaaccacctcagaatccagtttaccctgtgctgtccagcttctcccttgggaaaaagtctctcctgtttctctctcctccttccacctcccctccctccatcacctcacgcctttctgttccttgtcctcaccttactcccctcaggaccctaccccaccctctttgaaaagacaaagctctgcctacatagaagactttttttattttaaccaaagttactgttgtttacagtgagtttggggaaaaaaaataaaataaaaatggctttcccagtccttgcatcaacgggatgccacatttcataactgtttttaatggtaaaaaaaaaaaaaaaaaatacaaaaaaaaattctgaaggacaaaaaaggtgactgctgaactgtgtgtggtttattgttgtacattcacaatcttgcaggagccaagaagttcgcagttgtgaacagaccctgttcactggagaggcctgtgcagtagagtgtagaccctttcatgtactgtactgtacacctgatactgtaaacatactgtaataataatgtctcacatggaaacagaaaacgctgggtcagcagcaagctgtagtttttaaaaatgtttttagttaaacgttgaggagaaaaaaaaaaaaggcttttcccccaaagtatcatgtgtgaacctacaacaccctgacctctttctctcctccttgattgtatgaataaccctgagatcacctcttagaactggttttaacctttagctgcagcggctacgctgccacgtgtgtatatatatgacgttgtacattgcacatacccttggatccccacagtttggtcctcctcccagctacccctttatagtatgacgagttaacaagttggtgacctgcacaaagcgagacacagctatttaatctcttgccagatatcgcccctcttggtgcgatgctgtacaggtctctgtaaaaagtccttgctgtctcagcagccaatcaacttatagtttatttttttctgggtttttgttttgttttgttttctttctaatcgaggtgtgaaaaagttctaggttcagttgaagttctgatgaagaaacacaattgagattttttcagtgataaaatctgcatatttgtatttcaacaatgtagctaaaacttgatgtaaattcctcctttttttccttttttggcttaatgaatatcatttattcagtatgaaatctttatactatatgttccacgtgttaagaataaatgtacattaaatcttggtaagacttt

SEQ ID NO: 69 - DNA, 8559 bp, Homo sapiens
cagaaagcggagagtcacagcggggccaggccctggggagcggagcctccaccgcccccctcattcccaggcaagggcttggggggaatgagccgggagagccgggtcccgagcctacagagccgggagcagctgagccgccggcgcctcggccgccgccgccgcctcctcctcctccgccgccgccagcccggagcctgagccggcggggcgggggggagaggagcgagcgcagcgcagcagcggagccccgcgaggcccgcccgggcgggtggggagggcagcccgggggactgggccccggggcggggtgggagggggggagaagacgaagacagggccgggtctctccgcggacgagacagcggggatcatggccgcgcaggtcgcccccgccgccgccagcagcctgggcaacccgccgccgccgccgccctcggagctgaagaaagccgagcagcagcagcgggaggaggcggggggcgaggcggcaaatgaaggcagccgccgggcaggaaagcgagggccccgccgtggggccgccgcagccgctgggaaaggagctgcaggacggggccgagagcaatgggggtggcggcggcggcggagccggcagcggcggcgggcccggcgcggagccggacctgaagaactcgaacgggaacgcgggccctaggcccgccctgaacaataacctcacggagccgcccggcggcggcggtggcggcagcagcgatggggtgggggcgcctcctcactcagccgcggccgccttgccgcccccagcctacggcttcgggcaaccctacggccggagcccgtctgccgtcgccgccgccgcggccgccgtcttccaccaacaacatggcggacaacaaagccctggcctggcagcgctgcagagcggcggcggcgggggcctggagccctacgcggggccccagcagaactctcacgaccacggcttccccaaccaccagtacaactcctactaccccaaccgcagcgcctaccccccgcccgccccggcctacgcgctgagctccccgagaggtggcactccgggctccggcgcggcggcggctgccggctccaagccgcctccctcctccagcgcctccgcctcctcgtcgtcttcgtccttcgctcagcagcgcttcggggccatggggggaggcggcccctccgcggccggcgggggaactccccagcccaccgccacccccaccctcaaccaactgctcacgtcgcccagctcggcccggggctaccagggctaccccgggggcgactacagtggcgggccccaggacgggggcgccggcaagggcccggcggacatggcctcgcagtgttggggggctgcggcggcggcagctgcggcggcggccgcctcgggaggggcccaacaaaggagccaccacgcgcccatgagccccgggagcagcggcggcggggggcagccgctcgcccggacccctcagccatccagtccaatggatcagatgggcaagatgagacctcagccatatggcgggactaacccatactcgcagcaacagggacctccgtcaggaccgcagcaaggacatgggtacccagggcagccatacgggtcccagaccccgcagcggtacccgatgaccatgcagggccgggcgcagagtgccatgggcggcctctcttatacacagcagattcctccttatggacaacaaggccccagcgggtatggtcaacagggccagactccatattacaaccagcaaagtcctcaccctcagcagcagcagccaccctactcccagcaaccaccgtcccagacccctcatgcccaaccttcgtatcagcagcagccacagtctcaaccaccacagctccagtcctctcagcctccatactcccagcagccatcccagcctccacatcagcagtccccggctccatacccctcccagcagtcgacgacacagcagcacccccagagccagcccccctactcacagccacaggctcagtctccttaccagcagcagcaacctcagcagccagcaccctcgacgctctcccagcaggctgcgtatcctcagccccagtctcagcagtcccagcaaactgcctattcccagcagcgcttccctccaccgcaggagctatctcaagattcatttgggtctcaggcatcctcagccccctcaatgacctccagtaagggagggcaagaagatatgaacctgagccttcagtcaagaccctccagcttgcctgatctatctggttcaatagatgacctccccatggggacagaaggagctctgagtcctggagtgagcacatcagggatttccagcagccaaggagagcagagtaatccagctcagtctcctttctctcctcatacctcccctcacctgcctggcatccgaggcccttccccgtcccctgttggctctcccgccagtgttgctcagtctcgctcaggaccactctcgcctgctgcagtgccaggcaaccagatgccacctcggccacccagtggccagtcggacagcatcatgcatccttccatgaaccaatcaagcattgcccaagatcgaggttatatgcagaggaacccccagatgccccagtacagttccccccagcccggctcagccttatctccgcgtcagccttccggaggacagatacacacaggcatgggctcctaccagcagaactccatggggagctatggtccccaggggggtcagtatggcccacaaggtggctaccccaggcagccaaactataatgccttgcccaatgccaactaccccagtgcaggcatggctggaggcataaaccccatgggtgccggaggtcaaatgcatggacagcctggcatcccaccttatggcacactccctccagggaggatgagtcacgcctccatgggcaaccggccttatggccctaacatggccaatatgccacctcaggttgggtcagggatgtgtcccccaccagggggcatgaaccggaaaacccaagaaactgctgtcgccatgcatgttgctgccaactctatccaaaacaggccgccaggctaccccaatatgaatcaagggggcatgatgggaactggacctccttatggacaagggattaatagtatggctggcatgatcaaccctcagggacccccatattccatgggtggaaccatggccaacaattctgcagggatggcagccagcccagagatgatgggccttggggatgtaaagttaactccagccaccaaaatgaacaacaaggcagatgggacacccaagacagaatccaaatccaagaaatccagttcttctactacaaccaatgagaagatcaccaagttgtatgagctgggtggtgagcctgagaggaagatgtgggtggaccgttatctggccttcactgaggagaaggccatgggcatgacaaatctgcctgctgtgggtaggaaacctctggacctctatcgcctctatgtgtctgtgaaggagattggtggattgactcaggtcaacaagaacaaaaaatggcgggaacttgcaaccaacctcaatgtgggcacatcaagcagtgctgccagctccttgaaaaagcagtatatccagtgtctctatgcctttgaatgcaagattgaacggggagaagaccctcccccagacatctttgcagctgctgattccaagaagtcccagcccaagatccagcctccctctcctgcgggatcaggatctatgcaggggccccagactccccagtcaaccagcagttccatggcagaaggaggagacttaaagccaccaactccagcatccacaccacacagtcagatccccccattgccaggcatgagcaggagcaattcagttgggatccaggatgcctttaatgatggaagtgactccacattccagaagcggaattccatgactccaaaccctgggtatcagcccagtatgaatacctctgacatgatggggcgcatgtcctatgagccaaataaggatccttatggcagcatgaggaaagctccagggagtgatcccttcatgtcctcagggcagggccccaacggcgggatgggtgacccctacagtcgtgctgccggccctgggctaggaaatgtggcgatgggaccacgacagcactatccctatggaggtccttatgacagagtgaggacggagcctggaatagggcctgagggaaacatgagcactggggccccacagccgaatctcatgccttccaacccagactcggggatgtattctcctagccgctaccccccgcagcagcagcagcagcagcagcaacgacatgattcctatggcaatcagttctccacccaaggcaccccttctggcagccccttccccagccagcagactacaatgtatcaacagcaacagcagaattacaagcggccaatggatggcacatatggccctcctgccaagcggcacgaaggggagatgtacagcgtgccatacagcactgggcaggggcagcctcagcagcagcagttgcccccagcccagccccagcctgccagccagcaacaagctgcccagccttcccctcagcaagatgtatacaaccagtatggcaatgcctatcctgccactgccacagctgctactgagcgccgaccagcaggcggcccccagaaccaatttccattccagtttggccgagaccgtgtctctgcaccccctggcaccaatgcccagcaaaacatgccaccacaaatgatgggcggccccatacaggcatcagctgaggttgctcagcaaggcaccatgtggcaggggcgtaatgacatgacctataattatgccaacaggcagagcacgggctctgccccccagggccccgcctatcatggcgtgaaccgaacagatgaaatgctgcacacagatcagagggccaaccacgaaggctcgtggccttcccatggcacacgccagcccccatatggtccctctgcccctgtgccccccatgacaaggccccctccatctaactaccagcccccaccaagcatgcagaatcacattcctcaggtatccagccctgctcccctgccccggccaatggagaaccgcacctctcctagcaagtctccattcctgcactctgggatgaaaatgcagaaggcaggtcccccagtacctgcctcgcacatagcacctgcccctgtgcagccccccatgattcggcgggatatcaccttcccacctggctctgttgaagccacacagcctgtgttgaagcagaggaggcggctcacaatgaaagacattggaaccccggaggcatggcgggtaatgatgtccctcaagtctggtctcctggcagagagcacatgggcattagataccatcaacatcctgctgtatgatgacaacagcatcatgaccttcaacctcagtcagctcccagggttgctagagctccttgtagaatatttccgacgatgcctgattgagatctttggcattttaaaggagtatgaggtgggtgacccaggacagagaacgctactggatcctgggaggttcagcaaggtgtctagtccagctcccatggagggtggggaagaagaagaagaacttctaggtcctaaactagaagaggaagaagaagaggaagtagttgaaaatgatgaggagatagccttttcaggcaaggacaagccagcttcagagaatagtgaggagaagctgatcagtaagtttgacaagcttccagtaaagatcgtacagaagaatgatccatttgtggtggactgctcagataagcttgggcgtgtgcaggagtttgacagtggcctgctgcactggcggattggtgggggggacaccactgagcatatccagacccacttcgagagcaagacagagctgctgccttcccggcctcacgcaccctgcccaccagcccctcggaagcatgtgacaacagcagagggtacaccagggacaacagaccaggaggggcccccacctgatggacctccagaaaaacggatcacagccactatggatgacatgttgtctactcggtctagcaccttgaccgaggatggagctaagagttcagaggccatcaaggagagcagcaagtttccatttggcattagcccagcacagagccaccggaacatcaagatcctagaggacgaaccccacagtaaggatgagaccccactgtgtacccttctggactggcaggattctcttgccaagcgctgcgtctgtgtgtccaataccattcgaagcctgtcatttgtgccaggcaatgactttgagatgtccaaacacccagggctgctgctcatcctgggcaagctgatcctgctgcaccacaagcacccagaacggaagcaggcaccactaacttatgaaaaggaggaggaacaggaccaaggggtgagctgcaacaaagtggagtggtggtgggactgcttggagatgctccgggaaaacaccttggttacactcgccaacatctcggggcagttggacctatctccataccccgagagcatttgcctgcctgtcctggacggactcctacactgggcagtttgcccttcagctgaagcccaggaccccttttccaccctgggccccaatgccgtcctttccccgcagagactggtcttggaaaccctcagcaaactcagcatccaggacaacaatgtggacctgattctggccacaccccccttcagccgcctggagaagttgtatagcactatggtgcgcttcctcagtgaccgaaagaacccggtgtgccgggagatggctgtggtactgctggccaacctggctcagggggacagcctggcagctcgtgccattgcagtgcagaagggcagtatcggcaacctcctgggcttcctagaggacagccttgccgccacacagttccagcagagccaggccagcctcctccacatgcagaacccaccctttgagccaactagtgtggacatgatgcggcgggctgcccgcgcgctgcttgccttggccaaggtggacgagaaccactcagagtttactctgtacgaatcacggctgttggacatctcggtatcaccgttgatgaactcattggtttcacaagtcatttgtgatgtactgtttttgattggccagtcatgacagccgtgggacacctcccccccccgtgtgtgtgtgcgtgtgtggagaacttagaaactgactgttgccctttatttatgcaaaaccacctcagaatccagtttaccctgtgctgtccagcttctcccttgggaaaaagtctctcctgtttctctctcctccttccacctcccctccctccatcacctcacgcctttctgttccttgtcctcaccttactcccctcaggaccctaccccaccctctttgaaaagacaaagctctgcctacatagaagactttttttattttaaccaaagttactgttgtttacagtgagtttggggaaaaaaaataaaataaaaatggctttcccagtccttgcatcaacgggatgccacatttcataactgtttttaatggtaaaaaaaaaaaaaaaaaatacaaaaaaaaattctgaaggacaaaaaaggtgactgctgaactgtgtgtggtttattgttgtacattcacaatcttgcaggagccaagaagttcgcagttgtgaacagaccctgttcactggagaggcctgtgcagtagagtgtagaccctttcatgtactgtactgtacacctgatactgtaaacatactgtaataataatgtctcacatggaaacagaaaacgctgggtcagcagcaagctgtagtttttaaaaatgtttttagttaaacgttgaggagaaaaaaaaaaaaggcttttcccccaaagtatcatgtgtgaacctacaacaccctgacctctttctctcctccttgattgtatgaataaccctgagatcacctcttagaactggttttaacctttagctgcagcggctacgctgccacgtgtgtatatatatgacgttgtacattgcacatacccttggatccccacagtttggtcctcctcccagctacccctttatagtatgacgagttaacaagttggtgacctgcacaaagcgagacacagctatttaatctcttgccagatatcgcccctcttggtgcgatgctgtacaggtctctgtaaaaagtccttgctgtctcagcagccaatcaacttatagtttatttttttctgggtttttgttttgttttgttttctttctaatcgaggtgtgaaaaagttctaggttcagttgaagttctgatgaagaaacacaattgagattttttcagtgataaaatctgcatatttgtatttcaacaatgtagctaaaacttgatgtaaattcctcctttttttccttttttggcttaatgaatatcatttattcagtatgaaatctttatactatatgttccacgtgttaagaataaatgtacattaaatcttggtaagacttt

SEQ ID NO: 70 - DNA, 8585 bp, Homo sapiens
cagaaagcggagagtcacagcggggccaggccctggggagcggagcctccaccgcccccctcattcccaggcaagggcttggggggaatgagccgggagagccgggtcccgagcctacagagccgggagcagctgagccgccggcgcctcggccgccgccgccgcctcctcctcctccgccgccgccagcccggagcctgagccggcggggcgggggggagaggagcgagcgcagcgcagcagcggagccccgcgaggcccgcccgggcgggtggggagggcagcccgggggactgggccccggggcggggtgggagggggggagaagacgaagacagggccgggtctctccgcggacgagacagcggggatcatggccgcgcaggtcgcccccgccgccgccagcagcctgggcaacccgccgccgccgccgccctcggagctgaagaaagccgagcagcagcagcgggaggaggcggggggcgaggcggcggcggcggcagcggccgagcgcggggaaatgaaggcagccgccgggcaggaaagcgagggccccgccgtggggccgccgcagccgctgggaaaggagctgcaggacggggccgagagcaatgggggtggcggcggcggcggagccggcagcggcggcgggcccggcgcggagccggacctgaagaactcgaacgggaacgcgggccctaggcccgccctgaacaataacctcacggagccgcccggcggcggcggtggcggcagcagcgatggggtgggggcgcctcctcactcagccgcggccgccttgccgcccccagcctacggcttcgggcaaccctacggccggagcccgtctgccgtcgccgccgccgcggccgccgtcttccaccaacaacatggcggacaacaaagccctggcctggcagcgctgcagagcggcggcggcgggggcctggagccctacgcggggccccagcagaactctcacgaccacggcttccccaaccaccagtacaactcctactaccccaaccgcagcgcctaccccccgcccgccccggcctacgcgctgagctccccgagaggtggcactccgggctccggcgcggcggcggctgccggctccaagccgcctccctcctccagcgcctccgcctcctcgtcgtcttcgtccttcgctcagcagcgcttcggggccatggggggaggcggcccctccgcggccggcgggggaactccccagcccaccgccacccccaccctcaaccaactgctcacgtcgcccagctcggcccggggctaccagggctaccccgggggcgactacagtggcgggccccaggacgggggcgccggcaagggcccggcggacatggcctcgcagtgttggggggctgcggcggcggcagctgcggcggcggccgcctcgggaggggcccaacaaaggagccaccacgcgcccatgagccccgggagcagcggcggcggggggcagccgctcgcccggacccctcagccatccagtccaatggatcagatgggcaagatgagacctcagccatatggcgggactaacccatactcgcagcaacagggacctccgtcaggaccgcagcaaggacatgggtacccagggcagccatacgggtcccagaccccgcagcggtacccgatgaccatgcagggccgggcgcagagtgccatgggcggcctctcttatacacagcagattcctccttatggacaacaaggccccagcgggtatggtcaacagggccagactccatattacaaccagcaaagtcctcaccctcagcagcagcagccaccctactcccagcaaccaccgtcccagacccctcatgcccaaccttcgtatcagcagcagccacagtctcaaccaccacagctccagtcctctcagcctccatactcccagcagccatcccagcctccacatcagcagtccccggctccatacccctcccagcagtcgacgacacagcagcacccccagagctagcccccctactcacagccacaggctcagtctccttaccagcagcagcaacctcagcagccagcaccctcgacgctctcccagcaggctgcgtatcctcagccccagtctcagcagtcccagcaaactgcctattcccagcagcgcttccctccaccgcaggagctatctcaagattcatttgggtctcaggcatcctcagccccctcaatgacctccagtaagggagggcaagaagatatgaacctgagccttcagtcaagaccctccagcttgcctgatctatctggttcaatagatgacctccccatggggacagaaggagctctgagtcctggagtgagcacatcagggatttccagcagccaaggagagcagagtaatccagctcagtctcctttctctcctcatacctcccctcacctgcctggcatccgaggcccttccccgtcccctgttggctctcccgccagtgttgctcagtctcgctcaggaccactctcgcctgctgcagtgccaggcaaccagatgccacctcggccacccagtggccagtcggacagcatcatgcatccttccatgaaccaatcaagcattgcccaagatcgaggttatatgcagaggaacccccagatgccccagtacagttccccccagcccggctcagccttatctccgcgtcagccttccggaggacagatacacacaggcatgggctcctaccagcagaactccatggggagctatggtccccaggggggtcagtatggcccacaaggtggctaccccaggcagccaaactataatgccttgcccaatgccaactaccccagtgcaggcatggctggaggcataaaccccatgggtgccggaggtcaaatgcatggacagcctggcatcccaccttatggcacactccctccagggaggatgagtcacgcctccatgggcaaccggccttatggccctaacatggccaatatgccacctcaggttgggtcagggatgtgtcccccaccagggggcatgaaccggaaaacccaagaaactgctgtcgccatgcatgttgctgccaactctatccaaaacaggccgccaggctaccccaatatgaatcaagggggcatgatgggaactggacctccttatggacaagggattaatagtatggctggcatgatcaaccctcagggacccccatattccatgggtggaaccatggccaacaattctgcagggatggcagccagcccagagatgatgggccttggggatgtaaagttaactccagccaccaaaatgaacaacaaggcagatgggacacccaagacagaatccaaatccaagaaatccagttcttctactacaaccaatgagaagatcaccaagttgtatgagctgggtggtgagcctgagaggaagatgtgggtggaccgttatctggccttcactgaggagaaggccatgggcatgacaaatctgcctgctgtgggtaggaaacctctggacctctatcgcctctatgtgtctgtgaaggagattggtggattgactcaggtcaacaagaacaaaaaatggcgggaacttgcaaccaacctcaatgtgggcacatcaagcagtgctgccagctccttgaaaaagcagtatatccagtgtctctatgcctttgaatgcaagattgaacggggagaagaccctcccccagacatctttgcagctgctgattccaagaagtcccagcccaagatccagcctccctctcctgcgggatcaggatctatgcaggggccccagactccccagtcaaccagcagttccatggcagaaggaggagacttaaagccaccaactccagcatccacaccacacagtcagatccccccattgccaggcatgagcaggagcaattcagttgggatccaggatgcctttaatgatggaagtgactccacattccagaagcggaattccatgactccaaaccctgggtatcagcccagtatgaatacctctgacatgatggggcgcatgtcctatgagccaaataaggatccttatggcagcatgaggaaagctccagggagtgatcccttcatgtcctcagggcagggccccaacggcgggatgggtgacccctacagtcgtgctgccggccctgggctaggaaatgtggcgatgggaccacgacagcactatccctatggaggtccttatgacagagtgaggacggagcctggaatagggcctgagggaaacatgagcactggggccccacagccgaatctcatgccttccaacccagactcggggatgtattctcctagccgctaccccccgcagcagcagcagcagcagcagcaacgacatgattcctatggcaatcagttctccacccaaggcaccccttctggcagccccttccccagccagcagactacaatgtatcaacagcaacagcagaattacaagcggccaatggatggcacatatggccctcctgccaagcggcacgaaggggagatgtacagcgtgccatacagcactgggcaggggcagcctcagcagcagcagttgcccccagcccagccccagcctgccagccagcaacaagctgcccagccttcccctcagcaagatgtatacaaccagtatggcaatgcctatcctgccactgccacagctgctactgagcgccgaccagcaggcggcccccagaaccaatttccattccagtttggccgagaccgtgtctctgcaccccctggcaccaatgcccagcaaaacatgccaccacaaatgatgggcggccccatacaggcatcagctgaggttgctcagcaaggcaccatgtggcaggggcgtaatgacatgacctataattatgccaacaggcagagcacgggctctgccccccagggccccgcctatcatggcgtgaaccgaacagatgaaatgctgcacacagatcagagggccaaccacgaaggctcgtggccttcccatggcacacgccagcccccatatggtccctctgcccctgtgccccccatgacaaggccccctccatctaactaccagcccccaccaagcatgcagaatcacattcctcaggtatccagccctgctcccctgccccggccaatggagaaccgcacctctcctagcaagtctccattcctgcactctgggatgaaaatgcagaaggcaggtcccccagtacctgcctcgcacatagcacctgcccctgtgcagccccccatgattcggcgggatatcaccttcccacctggctctgttgaagccacacagcctgtgttgaagcagaggaggcggctcacaatgaaagacattggaaccccggaggcatggcgggtaatgatgtccctcaagtctggtctcctggcagagagcacatgggcattagataccatcaacatcctgctgtatgatgacaacagcatcatgaccttcaacctcagtcagctcccagggttgctagagctccttgtagaatatttccgacgatgcctgattgagatctttggcattttaaaggagtatgaggtgggtgacccaggacagagaacgctactggatcctgggaggttcagcaaggtgtctagtccagctcccatggagggtggggaagaagaagaagaacttctaggtcctaaactagaagaggaagaagaagaggaagtagttgaaaatgatgaggagatagccttttcaggcaaggacaagccagcttcagagaatagtgaggagaagctgatcagtaagtttgacaagcttccagtaaagatcgtacagaagaatgatccatttgtggtggactgctcagataagcttgggcgtgtgcaggagtttgacagtggcctgctgcactggcggattggtgggggggacaccactgagcatatccagacccacttcgagagcaagacagagctgctgccttcccggcctcacgcaccctgcccaccagcccctcggaagcatgtgacaacagcagagggtacaccagggacaacagaccaggaggggcccccacctgatggacctccagaaaaacggatcacagccactatggatgacatgttgtctactcggtctagcaccttgaccgaggatggagctaagagttcagaggccatcaaggagagcagcaagtttccatttggcattagcccagcacagagccaccggaacatcaagatcctagaggacgaaccccacagtaaggatgagaccccactgtgtacccttctggactggcaggattctcttgccaagcgctgcgtctgtgtgtccaataccattcgaagcctgtcatttgtgccaggcaatgactttgagatgtccaaacacccagggctgctgctcatcctgggcaagctgatcctgctgcaccacaagcacccagaacggaagcaggcaccactaacttatgaaaaggaggaggaacaggaccaaggggtgagctgcaacaaagtggagtggtggtgggactgcttggagatgctccgggaaaacaccttggttacactcgccaacatctcggggcagttggacctatctccataccccgagagcatttgcctgcctgtcctggacggactcctacactgggcagtttgcccttcagctgaagcccaggaccccttttccaccctgggccccaatgccgtcctttccccgcagagactggtcttggaaaccctcagcaaactcagcatccaggacaacaatgtggacctgattctggccacaccccccttcagccgcctggagaagttgtatagcactatggtgcgcttcctcagtgaccgaaagaacccggtgtgccgggagatggctgtggtactgctggccaacctggctcagggggacagcctggcagctcgtgccattgcagtgcagaagggcagtatcggcaacctcctgggcttcctagaggacagccttgccgccacacagttccagcagagccaggccagcctcctccacatgcagaacccaccctttgagccaactagtgtggacatgatgcggcgggctgcccgcgcgctgcttgccttggccaaggtggacgagaaccactcagagtttactctgtacgaatcacggctgttggacatctcggtatcaccgttgatgaactcattggtttcacaagtcatttgtgatgtactgtttttgattggccagtcatgacagccgtgggacacctcccccccccgtgtgtgtgtgcgtgtgtggagaacttagaaactgactgttgccctttatttatgcaaaaccacctcagaatccagtttaccctgtgctgtccagcttctcccttgggaaaaagtctctcctgtttctctctcctccttccacctcccctccctccatcacctcacgcctttctgttccttgtcctcaccttactcccctcaggaccctaccccaccctctttgaaaagacaaagctctgcctacatagaagactttttttattttaaccaaagttactgttgtttacagtgagtttggggaaaaaaaataaaataaaaatggctttcccagtccttgcatcaacgggatgccacatttcataactgtttttaatggtaaaaaaaaaaaaaaaaaatacaaaaaaaaattctgaaggacaaaaaaggtgactgctgaactgtgtgtggtttattgttgtacattcacaatcttgcaggagccaagaagttcgcagttgtgaacagaccctgttcactggagaggcctgtgcagtagagtgtagaccctttcatgtactgtactgtacacctgatactgtaaacatactgtaataataatgtctcacatggaaacagaaaacgctgggtcagcagcaagctgtagtttttaaaaatgtttttagttaaacgttgaggagaaaaaaaaaaaaggcttttcccccaaagtatcatgtgtgaacctacaacaccctgacctctttctctcctccttgattgtatgaataaccctgagatcacctcttagaactggttttaacctttagctgcagcggctacgctgccacgtgtgtatatatatgacgttgtacattgcacatacccttggatccccacagtttggtcctcctcccagctacccctttatagtatgacgagttaacaagttggtgacctgcacaaagcgagacacagctatttaatctcttgccagatatcgcccctcttggtgcgatgctgtacaggtctctgtaaaaagtccttgctgtctcagcagccaatcaacttatagtttatttttttctgggtttttgttttgttttgttttctttctaatcgaggtgtgaaaaagttctaggttcagttgaagttctgatgaagaaacacaattgagattttttcagtgataaaatctgcatatttgtatttcaacaatgtagctaaaacttgatgtaaattcctcctttttttccttttttggcttaatgaatatcatttattcagtatgaaatctttatactatatgttccacgtgttaagaataaatgtacattaaatcttggtaagacttt

SEQ ID NO: 71 - DNA, 8585 bp, Homo sapiens
cagaaagcggagagtcacagcggggccaggccctggggagcggagcctccaccgcccccctcattcccaggcaagggcttggggggaatgagccgggagagccgggtcccgagcctacagagccgggagcagctgagccgccggcgcctcggccgccgccgccgcctcctcctcctccgccgccgccagcccggagcctgagccggcggggcgggggggagaggagcgagcgcagcgcagcagcggagccccgcgaggcccgcccgggcgggtggggagggcagcccgggggactgggccccggggcggggtgggagggggggagaagacgaagacagggccgggtctctccgcggacgagacagcggggatcatggccgcgcaggtcgcccccgccgccgccagcagcctgggcaacccgccgccgccgccgccctcggagctgaagaaagccgagcagcagcagcgggaggaggcggggggcgaggcggcggcggcggcagcggccgagcgcggggaaatgaaggcagccgccgggcaggaaagcgagggccccgccgtggggccgccgcagccgctgggaaaggagctgcaggacggggccgagagcaatgggggtggcggcggcggcggagccggcagcggcggcgggcccggcgcggagccggacctgaagaactcgaacgggaacgcgggccctaggcccgccctgaacaataacctcacggagccgcccggcggcggcggtggcggcagcagcgatggggtgggggcgcctcctcactcagccgcggccgccttgccgcccccagcctacggcttcgggcaaccctacggccggagcccgtctgccgtcgccgccgccgcggccgccgtcttccaccaacaacatggcggacaacaaagccctggcctggcagcgctgcagagcggcggcggcgggggcctggagccctacgcggggccccagcagaactctcacgaccacggcttccccaaccaccagtacaactcctactaccccaaccgcagcgcctaccccccgcccgccccggcctacgcgctgagctccccgagaggtggcactccgggctccggcgcggcggcggctgccggctccaagccgcctccctcctccagcgcctccgcctcctcgtcgtcttcgtccttcgctcagcagcgcttcggggccatggggggaggcggcccctccgcggccggcgggggaactccccagcccaccgccacccccaccctcaaccaactgctcacgtcgcccagctcggcccggggctaccagggctaccccgggggcgactacagtggcgggccccaggacgggggcgccggcaagggcccggcggacatggcctcgcagtgttggggggctgcggcggcggcagctgcggcggcggccgcctcgggaggggcccaacaaaggagccaccacgcgcccatgagccccgggagcagcggcggcggggggcagccgctcgcccggacccctcagccatccagtccaatggatcagatgggcaagatgagacctcagccatatggcgggactaacccatactcgcagcaacagggacctccgtcaggaccgcagcaaggacatgggtacccagggcagccatacgggtcccagaccccgcagcggtacccgatgaccatgcagggccgggcgcagagtgccatgggcggcctctcttatacacagcagattcctccttatggacaacaaggccccagcgggtatggtcaacagggccagactccatattacaaccagcaaagtcctcaccctcagcagcagcagccaccctactcccagcaaccaccgtcccagacccctcatgcccaaccttcgtatcagcagcagccacagtctcaaccaccacagctccagtcctctcagcctccatactcccagcagccatcccagcctccacatcagcagtccccggctccatacccctcccagcagtcgacgacacagcagcacccccagagccagcccccctactcacagccacaggctcagtctccttaccagcagcagcaacctcagcagccagcaccctcgacgctctcccagcaggctgcgtatcctcagccccagtctcagcagtcccagcaaactgcctattcccagcagcgcttccctccaccgcaggagctatctcaagattcatttgggtctcaggcatcctcagccccctcaatgacctccagtaagggagggcaagaagatatgaacctgagccttcagtcaagaccctccagcttgcctgatctatctggttcaatagatgacctccccatggggacagaaggagctctgagtcctggagtgagcacatcagggatttccagcagccaaggagagcagagtaatccagctcagtctcctttctctcctcatacctcccctcacctgcctggcatccgaggcccttccccgtcccctgttggctctcccgccagtgttgctcagtctcgctcaggaccactctcgcctgctgcagtgccaggcaaccagatgccacctcggccacccagtggccagtcggacagcatcatgcatccttccatgaaccaatcaagcattgcccaagatcgaggttatatgcagaggaacccccagatgccccagtacagttccccccagcccggctcagccttatctccgcgtcagccttccggaggacagatacacacaggcatgggctcctaccagcagaactccatggggagctatggtccccaggggggtcagtatggcccacaaggtggctaccccaggcagccaaactataatgccttgcccaatgccaactaccccagtgcaggcatggctggaggcataaaccccatgggtgccggaggtcaaatgcatggacagcctggcatcccaccttatggcacactccctccagggaggatgagtcacgcctccatgggcaaccggccttatggccctaacatggccaatatgccacctcaggttgggtcagggatgtgtcccccaccagggggcatgaaccggaaaacccaagaaactgctgtcgccatgcatgttgctgccaactctatccaaaacaggccgccaggctaccccaatatgaatcaagggggcatgatgggaactggacctccttatggacaagggattaatagtatggctggcatgatcaaccctcagggacccccatattccatgggtggaaccatggccaacaattctgcagggatggcagccagcccagagatgatgggccttggggatgtaaagttaactccagccaccaaaatgaacaacaaggcagatgggacacccaagacagaatccaaatccaagaaatccagttcttctactacaaccaatgagaagatcaccaagttgtatgagctgggtggtgagcctgagaggaagatgtgggtggaccgttatctggccttcactgaggagaaggccatgggcatgacaaatctgcctgctgtgggtaggaaacctctggacctctatcgcctctatgtgtctgtgaaggagattggtggattgactcaggtcaacaagaacaaaaaatggcgggaacttgcaaccaacctcaatgtgggcacatcaagcagtgctgccagctccttgaaaaagcagtatatccagtgtctctatgcctttgaatgcaagattgaacggggagaagaccctcccccagacatctttgcagctgctgattccaagaagtcccagcccaagatccagcctccctctcctgcgggatcaggatctatgcaggggccccagactccccagtcaaccagcagttccatggcagaaggaggagacttaaagccaccaactccagcatccacaccacacagtcagatccccccattgccaggcatgagcaggagcaattcagttgggatccaggatgcctttaatgatggaagtgactccacattccagaagcggaattccatgactccaaaccctgggtatcagcccagtatgaatacctctgacatgatggggcgcatgtcctatgagccaaataaggatccttatggcagcatgaggaaagctccagggagtgatcccttcatgtcctcagggcagggccccaacggcgggatgggtgacccctacagtcgtgctgccggccctgggctaggaaatgtggcgatgggaccacgacagcactatccctatggaggtccttatgacagagtgaggacggagcctggaatagggcctgagggaaacatgagcactggggccccacagccgaatctcatgccttccaacccagactcggggatgtattctcctagccgctaccccccgcagcagcagcagcagcagcagcaacgacatgattcctatggcaatcagttctccacccaaggcaccccttctggcagccccttccccagccagcagactacaatgtatcaacagcaacagcagaattacaagcggccaatggatggcacatatggccctcctgccaagcggcacgaaggggagatgtacagcgtgccatacagcactgggcaggggcagcctcagcagcagcagttgcccccagcccagccccagcctgccagccagcaacaagctgcccagccttcccctcagcaagatgtatacaaccagtatggcaatgcctatcctgccactgccacagctgctactgagcgccgaccagcaggcggcccccagaaccaatttccattccagtttggccgagaccgtgtctctgcaccccctggcaccaatgcccagcaaaacatgccaccacaaatgatgggcggccccatacaggcatcagctgaggttgctcagcaaggcaccatgtggcaggggcgtaatgacatgacctataattatgccaacaggcagagcacgggctctgccccccagggccccgcctatcatggcgtgaactgaacagatgaaatgctgcacacagatcagagggccaaccacgaaggctcgtggccttcccatggcacacgccagcccccatatggtccctctgcccctgtgccccccatgacaaggccccctccatctaactaccagcccccaccaagcatgcagaatcacattcctcaggtatccagccctgctcccctgccccggccaatggagaaccgcacctctcctagcaagtctccattcctgcactctgggatgaaaatgcagaaggcaggtcccccagtacctgcctcgcacatagcacctgcccctgtgcagccccccatgattcggcgggatatcaccttcccacctggctctgttgaagccacacagcctgtgttgaagcagaggaggcggctcacaatgaaagacattggaaccccggaggcatggcgggtaatgatgtccctcaagtctggtctcctggcagagagcacatgggcattagataccatcaacatcctgctgtatgatgacaacagcatcatgaccttcaacctcagtcagctcccagggttgctagagctccttgtagaatatttccgacgatgcctgattgagatctttggcattttaaaggagtatgaggtgggtgacccaggacagagaacgctactggatcctgggaggttcagcaaggtgtctagtccagctcccatggagggtggggaagaagaagaagaacttctaggtcctaaactagaagaggaagaagaagaggaagtagttgaaaatgatgaggagatagccttttcaggcaaggacaagccagcttcagagaatagtgaggagaagctgatcagtaagtttgacaagcttccagtaaagatcgtacagaagaatgatccatttgtggtggactgctcagataagcttgggcgtgtgcaggagtttgacagtggcctgctgcactggcggattggtgggggggacaccactgagcatatccagacccacttcgagagcaagacagagctgctgccttcccggcctcacgcaccctgcccaccagcccctcggaagcatgtgacaacagcagagggtacaccagggacaacagaccaggaggggcccccacctgatggacctccagaaaaacggatcacagccactatggatgacatgttgtctactcggtctagcaccttgaccgaggatggagctaagagttcagaggccatcaaggagagcagcaagtttccatttggcattagcccagcacagagccaccggaacatcaagatcctagaggacgaaccccacagtaaggatgagaccccactgtgtacccttctggactggcaggattctcttgccaagcgctgcgtctgtgtgtccaataccattcgaagcctgtcatttgtgccaggcaatgactttgagatgtccaaacacccagggctgctgctcatcctgggcaagctgatcctgctgcaccacaagcacccagaacggaagcaggcaccactaacttatgaaaaggaggaggaacaggaccaaggggtgagctgcaacaaagtggagtggtggtgggactgcttggagatgctccgggaaaacaccttggttacactcgccaacatctcggggcagttggacctatctccataccccgagagcatttgcctgcctgtcctggacggactcctacactgggcagtttgcccttcagctgaagcccaggaccccttttccaccctgggccccaatgccgtcctttccccgcagagactggtcttggaaaccctcagcaaactcagcatccaggacaacaatgtggacctgattctggccacaccccccttcagccgcctggagaagttgtatagcactatggtgcgcttcctcagtgaccgaaagaacccggtgtgccgggagatggctgtggtactgctggccaacctggctcagggggacagcctggcagctcgtgccattgcagtgcagaagggcagtatcggcaacctcctgggcttcctagaggacagccttgccgccacacagttccagcagagccaggccagcctcctccacatgcagaacccaccctttgagccaactagtgtggacatgatgcggcgggctgcccgcgcgctgcttgccttggccaaggtggacgagaaccactcagagtttactctgtacgaatcacggctgttggacatctcggtatcaccgttgatgaactcattggtttcacaagtcatttgtgatgtactgtttttgattggccagtcatgacagccgtgggacacctcccccccccgtgtgtgtgtgcgtgtgtggagaacttagaaactgactgttgccctttatttatgcaaaaccacctcagaatccagtttaccctgtgctgtccagcttctcccttgggaaaaagtctctcctgtttctctctcctccttccacctcccctccctccatcacctcacgcctttctgttccttgtcctcaccttactcccctcaggaccctaccccaccctctttgaaaagacaaagctctgcctacatagaagactttttttattttaaccaaagttactgttgtttacagtgagtttggggaaaaaaaataaaataaaaatggctttcccagtccttgcatcaacgggatgccacatttcataactgtttttaatggtaaaaaaaaaaaaaaaaaatacaaaaaaaaattctgaaggacaaaaaaggtgactgctgaactgtgtgtggtttattgttgtacattcacaatcttgcaggagccaagaagttcgcagttgtgaacagaccctgttcactggagaggcctgtgcagtagagtgtagaccctttcatgtactgtactgtacacctgatactgtaaacatactgtaataataatgtctcacatggaaacagaaaacgctgggtcagcagcaagctgtagtttttaaaaatgtttttagttaaacgttgaggagaaaaaaaaaaaaggcttttcccccaaagtatcatgtgtgaacctacaacaccctgacctctttctctcctccttgattgtatgaataaccctgagatcacctcttagaactggttttaacctttagctgcagcggctacgctgccacgtgtgtatatatatgacgttgtacattgcacatacccttggatccccacagtttggtcctcctcccagctacccctttatagtatgacgagttaacaagttggtgacctgcacaaagcgagacacagctatttaatctcttgccagatatcgcccctcttggtgcgatgctgtacaggtctctgtaaaaagtccttgctgtctcagcagccaatcaacttatagtttatttttttctgggtttttgttttgttttgttttctttctaatcgaggtgtgaaaaagttctaggttcagttgaagttctgatgaagaaacacaattgagattttttcagtgataaaatctgcatatttgtatttcaacaatgtagctaaaacttgatgtaaattcctcctttttttccttttttggcttaatgaatatcatttattcagtatgaaatctttatactatatgttccacgtgttaagaataaatgtacattaaatcttggtaagacttt

SEQ ID NO: 72 - DNA, 8584 bp, Homo sapiens
cagaaagcggagagtcacagcggggccaggccctggggagcggagcctccaccgcccccctcattcccaggcaagggcttggggggaatgagccgggagagccgggtcccgagcctacagagccgggagcagctgagccgccggcgcctcggccgccgccgccgcctcctcctcctccgccgccgccagcccggagcctgagccggcggggcgggggggagaggagcgagcgcagcgcagcagcggagccccgcgaggcccgcccgggcgggtggggagggcagcccgggggactgggccccggggcggggtgggagggggggagaagacgaagacagggccgggtctctccgcggacgagacagcggggatcatggccgcgcaggtcgcccccgccgccgccagcagcctgggcaacccgccgccgccgccgccctcggagctgaagaaagccgagcagcagcagcgggaggaggcggggggcgaggcggcggcggcggcagcggccgagcgcggggaaatgaaggcagccgccgggcaggaaagcgagggccccgccgtggggccgccgcagccgctgggaaaggagctgcaggacggggccgagagcaatgggggtggcggcggcggcggagccggcagcggcggcgggcccggcgcggagccggacctgaagaactcgaacgggaacgcgggccctaggcccgccctgaacaataacctcacggagccgcccggcggcggcggtggcggcagcagcgatggggtgggggcgcctcctcactcagccgcggccgccttgccgcccccagcctacggcttcgggcaaccctacggccggagcccgtctgccgtcgccgccgccgcggccgccgtcttccaccaacaacatggcggacaacaaagccctggcctggcagcgctgcagagcggcggcggcgggggcctggagccctacgcggggccccagcagaactctcacgaccacggcttccccaaccaccagtacaactcctactaccccaaccgcagcgcctaccccccgcccgccccggcctacgcgctgagctccccgagaggtggcactccgggctccggcgcggcggcggctgccggctccaagccgcctccctcctccagcgcctccgcctcctcgtcgtcttcgtccttcgctcagcagcgcttcggggccatggggggaggcggcccctccgcggccggcgggggaactccccagcccaccgccacccccaccctcaaccaactgctcacgtcgcccagctcggcccggggctaccagggctaccccgggggcgactacagtggcgggccccaggacgggggcgccggcaagggcccggcggacatggcctcgcagtgttggggggctgcggcggcggcagctgcggcggcggccgcctcgggaggggcccaacaaaggagccaccacgcgcccatgagccccgggagcagcggcggcggggggcagccgctcgcccggacccctcagccatccagtccaatggatcagatgggcaagatgagacctcagccatatggcgggactaacccatactcgcagcaacagggacctccgtcaggaccgcagcaaggacatgggtacccagggcagccatacgggtcccagaccccgcagcggtacccgatgaccatgcagggccgggcgcagagtgccatgggcggcctctcttatacacagcagattcctccttatggacaacaaggccccagcgggtatggtcaacagggccagactccatattacaaccagcaaagtcctcaccctcagcagcagcagccaccctactcccagcaaccaccgtcccagacccctcatgcccaaccttcgtatcagcagcagccacagtctcaaccaccacagctccagtcctctcagcctccatactcccagcagccatcccagcctccacatcagcagtccccggctccatacccctcccagcagtcgacgacacagcagcacccccagagccagcccccctactcacagccacaggctcagtctccttaccagcagcagcaacctcagcagccagcaccctcgacgctctcccagcaggctgcgtatcctcagccccagtctcagcagtcccagcaaactgcctattcccagcagcgcttccctccaccgcaggagctatctcaagattcatttgggtctcaggcatcctcagccccctcaatgacctccagtaagggagggcaagaagatatgaacctgagccttcagtcaagaccctccagcttgcctgatctatctggttcaatagatgacctccccatggggacagaaggagctctgagtcctggagtgagcacatcagggatttccagcagccaaggagagcagagtaatccagctcagtctcctttctctcctcatacctcccctcacctgcctggcatccgaggcccttccccgtcccctgttggctctcccgccagtgttgctcagtctcgctcaggaccactctcgcctgctgcagtgccaggcaaccagatgccacctcggccacccagtggccagtcggacagcatcatgcatccttccatgaaccaatcaagcattgcccaagatcgaggttatatgcagaggaacccccagatgccccagtacagttccccccagcccggctcagccttatctccgcgtcagccttccggaggacagatacacacaggcatgggctcctaccagcagaactccatggggagctatggtccccaggggggtcagtatggcccacaaggtggctaccccaggcagccaaactataatgccttgcccaatgccaactaccccagtgcaggcatggctggaggcataaaccccatgggtgccggaggtcaaatgcatggacagcctggcatcccaccttatggcacactccctccagggaggatgagtcacgcctccatgggcaaccggccttatggccctaacatggccaatatgccacctcaggttgggtcagggatgtgtcccccaccagggggcatgaaccggaaaacccaagaaactgctgtcgccatgcatgttgctgccaactctatccaaaacaggccgccaggctaccccaatatgaatcaagggggcatgatgggaactggacctccttatggacaagggattaatagtatggctggcatgatcaaccctcagggacccccatattccatgggtggaaccatggccaacaattctgcagggatggcagccagcccagagatgatgggccttggggatgtaaagttaactccagccaccaaaatgaacaacaaggcagatgggacacccaagacagaatccaaatccaagaaatccagttcttctactacaaccaatgagaagatcaccaagttgtatgagctgggtggtgagcctgagaggaagatgtgggtggaccgttatctggccttcactgaggagaaggccatgggcatgacaaatctgcctgctgtgggtaggaaacctctggacctctatcgcctctatgtgtctgtgaaggagattggtggattgactcaggtcaacaagaacaaaaaatggcgggaacttgcaaccaacctcaatgtgggcacatcaagcagtgctgccagctccttgaaaaagcagtatatccagtgtctctatgcctttgaatgcaagattgaacggggagaagaccctcccccagacatctttgcagctgctgattccaagaagtcccagcccaagatccagcctccctctcctgcgggatcaggatctatgcaggggccccagactccccagtcaaccagcagttccatggcagaaggaggagacttaaagccaccaactccagcatccacaccacacagtcagatcccccattgccaggcatgagcaggagcaattcagttgggatccaggatgcctttaatgatggaagtgactccacattccagaagcggaattccatgactccaaaccctgggtatcagcccagtatgaatacctctgacatgatggggcgcatgtcctatgagccaaataaggatccttatggcagcatgaggaaagctccagggagtgatcccttcatgtcctcagggcagggccccaacggcgggatgggtgacccctacagtcgtgctgccggccctgggctaggaaatgtggcgatgggaccacgacagcactatccctatggaggtccttatgacagagtgaggacggagcctggaatagggcctgagggaaacatgagcactggggccccacagccgaatctcatgccttccaacccagactcggggatgtattctcctagccgctaccccccgcagcagcagcagcagcagcagcaacgacatgattcctatggcaatcagttctccacccaaggcaccccttctggcagccccttccccagccagcagactacaatgtatcaacagcaacagcagaattacaagcggccaatggatggcacatatggccctcctgccaagcggcacgaaggggagatgtacagcgtgccatacagcactgggcaggggcagcctcagcagcagcagttgcccccagcccagccccagcctgccagccagcaacaagctgcccagccttcccctcagcaagatgtatacaaccagtatggcaatgcctatcctgccactgccacagctgctactgagcgccgaccagcaggcggcccccagaaccaatttccattccagtttggccgagaccgtgtctctgcaccccctggcaccaatgcccagcaaaacatgccaccacaaatgatgggcggccccatacaggcatcagctgaggttgctcagcaaggcaccatgtggcaggggcgtaatgacatgacctataattatgccaacaggcagagcacgggctctgccccccagggccccgcctatcatggcgtgaaccgaacagatgaaatgctgcacacagatcagagggccaaccacgaaggctcgtggccttcccatggcacacgccagcccccatatggtccctctgcccctgtgccccccatgacaaggccccctccatctaactaccagcccccaccaagcatgcagaatcacattcctcaggtatccagccctgctcccctgccccggccaatggagaaccgcacctctcctagcaagtctccattcctgcactctgggatgaaaatgcagaaggcaggtcccccagtacctgcctcgcacatagcacctgcccctgtgcagccccccatgattcggcgggatatcaccttcccacctggctctgttgaagccacacagcctgtgttgaagcagaggaggcggctcacaatgaaagacattggaaccccggaggcatggcgggtaatgatgtccctcaagtctggtctcctggcagagagcacatgggcattagataccatcaacatcctgctgtatgatgacaacagcatcatgaccttcaacctcagtcagctcccagggttgctagagctccttgtagaatatttccgacgatgcctgattgagatctttggcattttaaaggagtatgaggtgggtgacccaggacagagaacgctactggatcctgggaggttcagcaaggtgtctagtccagctcccatggagggtggggaagaagaagaagaacttctaggtcctaaactagaagaggaagaagaagaggaagtagttgaaaatgatgaggagatagccttttcaggcaaggacaagccagcttcagagaatagtgaggagaagctgatcagtaagtttgacaagcttccagtaaagatcgtacagaagaatgatccatttgtggtggactgctcagataagcttgggcgtgtgcaggagtttgacagtggcctgctgcactggcggattggtgggggggacaccactgagcatatccagacccacttcgagagcaagacagagctgctgccttcccggcctcacgcaccctgcccaccagcccctcggaagcatgtgacaacagcagagggtacaccagggacaacagaccaggaggggcccccacctgatggacctccagaaaaacggatcacagccactatggatgacatgttgtctactcggtctagcaccttgaccgaggatggagctaagagttcagaggccatcaaggagagcagcaagtttccatttggcattagcccagcacagagccaccggaacatcaagatcctagaggacgaaccccacagtaaggatgagaccccactgtgtacccttctggactggcaggattctcttgccaagcgctgcgtctgtgtgtccaataccattcgaagcctgtcatttgtgccaggcaatgactttgagatgtccaaacacccagggctgctgctcatcctgggcaagctgatcctgctgcaccacaagcacccagaacggaagcaggcaccactaacttatgaaaaggaggaggaacaggaccaaggggtgagctgcaacaaagtggagtggtggtgggactgcttggagatgctccgggaaaacaccttggttacactcgccaacatctcggggcagttggacctatctccataccccgagagcatttgcctgcctgtcctggacggactcctacactgggcagtttgcccttcagctgaagcccaggaccccttttccaccctgggccccaatgccgtcctttccccgcagagactggtcttggaaaccctcagcaaactcagcatccaggacaacaatgtggacctgattctggccacaccccccttcagccgcctggagaagttgtatagcactatggtgcgcttcctcagtgaccgaaagaacccggtgtgccgggagatggctgtggtactgctggccaacctggctcagggggacagcctggcagctcgtgccattgcagtgcagaagggcagtatcggcaacctcctgggcttcctagaggacagccttgccgccacacagttccagcagagccaggccagcctcctccacatgcagaacccaccctttgagccaactagtgtggacatgatgcggcgggctgcccgcgcgctgcttgccttggccaaggtggacgagaaccactcagagtttactctgtacgaatcacggctgttggacatctcggtatcaccgttgatgaactcattggtttcacaagtcatttgtgatgtactgtttttgattggccagtcatgacagccgtgggacacctcccccccccgtgtgtgtgtgcgtgtgtggagaacttagaaactgactgttgccctttatttatgcaaaaccacctcagaatccagtttaccctgtgctgtccagcttctcccttgggaaaaagtctctcctgtttctctctcctccttccacctcccctccctccatcacctcacgcctttctgttccttgtcctcaccttactcccctcaggaccctaccccaccctctttgaaaagacaaagctctgcctacatagaagactttttttattttaaccaaagttactgttgtttacagtgagtttggggaaaaaaaataaaataaaaatggctttcccagtccttgcatcaacgggatgccacatttcataactgtttttaatggtaaaaaaaaaaaaaaaaaatacaaaaaaaaattctgaaggacaaaaaaggtgactgctgaactgtgtgtggtttattgttgtacattcacaatcttgcaggagccaagaagttcgcagttgtgaacagaccctgttcactggagaggcctgtgcagtagagtgtagaccctttcatgtactgtactgtacacctgatactgtaaacatactgtaataataatgtctcacatggaaacagaaaacgctgggtcagcagcaagctgtagtttttaaaaatgtttttagttaaacgttgaggagaaaaaaaaaaaaggcttttcccccaaagtatcatgtgtgaacctacaacaccctgacctctttctctcctccttgattgtatgaataaccctgagatcacctcttagaactggttttaacctttagctgcagcggctacgctgccacgtgtgtatatatatgacgttgtacattgcacatacccttggatccccacagtttggtcctcctcccagctacccctttatagtatgacgagttaacaagttggtgacctgcacaaagcgagacacagctatttaatctcttgccagatatcgcccctcttggtgcgatgctgtacaggtctctgtaaaaagtccttgctgtctcagcagccaatcaacttatagtttatttttttctgggtttttgttttgttttgttttctttctaatcgaggtgtgaaaaagttctaggttcagttgaagttctgatgaagaaacacaattgagattttttcagtgataaaatctgcatatttgtatttcaacaatgtagctaaaacttgatgtaaattcctcctttttttccttttttggcttaatgaatatcatttattcagtatgaaatctttatactatatgttccacgtgttaagaataaatgtacattaaatcttggtaagacttt

SEQ ID NO: 73 - DNA, 8586 bp, Homo sapiens
cagaaagcggagagtcacagcggggccaggccctggggagcggagcctccaccgcccccctcattcccaggcaagggcttggggggaatgagccgggagagccgggtcccgagcctacagagccgggagcagctgagccgccggcgcctcggccgccgccgccgcctcctcctcctccgccgccgccagcccggagcctgagccggcggggcgggggggagaggagcgagcgcagcgcagcagcggagccccgcgaggcccgcccgggcgggtggggagggcagcccgggggactgggccccggggcggggtgggagggggggagaagacgaagacagggccgggtctctccgcggacgagacagcggggatcatggccgcgcaggtcgcccccgccgccgccagcagcctgggcaacccgccgccgccgccgccctcggagctgaagaaagccgagcagcagcagcgggaggaggcggggggcgaggcggcggcggcggcagcggccgagcgcggggaaatgaaggcagccgccgggcaggaaagcgagggccccgccgtggggccgccgcagccgctgggaaaggagctgcaggacggggccgagagcaatgggggtggcggcggcggcggagccggcagcggcggcgggcccggcgcggagccggacctgaagaactcgaacgggaacgcgggccctaggcccgccctgaacaataacctcacggagccgcccggcggcggcggtggcggcagcagcgatggggtgggggcgcctcctcactcagccgcggccgccttgccgcccccagcctacggcttcgggcaaccctacggccggagcccgtctgccgtcgccgccgccgcggccgccgtcttccaccaacaacatggcggacaacaaagccctggcctggcagcgctgcagagcggcggcggcgggggcctggagccctacgcggggccccagcagaactctcacgaccacggcttccccaaccaccagtacaactcctactaccccaaccgcagcgcctaccccccgcccgccccggcctacgcgctgagctccccgagaggtggcactccgggctccggcgcggcggcggctgccggctccaagccgcctccctcctccagcgcctccgcctcctcgtcgtcttcgtccttcgctcagcagcgcttcggggccatggggggaggcggcccctccgcggccggcgggggaactccccagcccaccgccacccccaccctcaaccaactgctcacgtcgcccagctcggcccggggctaccagggctaccccgggggcgactacagtggcgggccccaggacgggggcgccggcaagggcccggcggacatggcctcgcagtgttggggggctgcggcggcggcagctgcggcggcggccgcctcgggaggggcccaacaaaggagccaccacgcgcccatgagccccgggagcagcggcggcggggggcagccgctcgcccggacccctcagccatccagtccaatggatcagatgggcaagatgagacctcagccatatggcgggactaacccatactcgcagcaacagggacctccgtcaggaccgcagcaaggacatgggtacccagggcagccatacgggtcccagaccccgcagcggtacccgatgaccatgcagggccgggcgcagagtgccatgggcggcctctcttatacacagcagattcctccttatggacaacaaggccccagcgggtatggtcaacagggccagactccatattacaaccagcaaagtcctcaccctcagcagcagcagccaccctactcccagcaaccaccgtcccagacccctcatgcccaaccttcgtatcagcagcagccacagtctcaaccaccacagctccagtcctctcagcctccatactcccagcagccatcccagcctccacatcagcagtccccggctccatacccctcccagcagtcgacgacacagcagcacccccagagccagcccccctactcacagccacaggctcagtctccttaccagcagcagcaacctcagcagccagcaccctcgacgctctcccagcaggctgcgtatcctcagccccagtctcagcagtcccagcaaactgcctattcccagcagcgcttccctccacccgcaggagctatctcaagattcatttgggtctcaggcatcctcagccccctcaatgacctccagtaagggagggcaagaagatatgaacctgagccttcagtcaagaccctccagcttgcctgatctatctggttcaatagatgacctccccatggggacagaaggagctctgagtcctggagtgagcacatcagggatttccagcagccaaggagagcagagtaatccagctcagtctcctttctctcctcatacctcccctcacctgcctggcatccgaggcccttccccgtcccctgttggctctcccgccagtgttgctcagtctcgctcaggaccactctcgcctgctgcagtgccaggcaaccagatgccacctcggccacccagtggccagtcggacagcatcatgcatccttccatgaaccaatcaagcattgcccaagatcgaggttatatgcagaggaacccccagatgccccagtacagttccccccagcccggctcagccttatctccgcgtcagccttccggaggacagatacacacaggcatgggctcctaccagcagaactccatggggagctatggtccccaggggggtcagtatggcccacaaggtggctaccccaggcagccaaactataatgccttgcccaatgccaactaccccagtgcaggcatggctggaggcataaaccccatgggtgccggaggtcaaatgcatggacagcctggcatcccaccttatggcacactccctccagggaggatgagtcacgcctccatgggcaaccggccttatggccctaacatggccaatatgccacctcaggttgggtcagggatgtgtcccccaccagggggcatgaaccggaaaacccaagaaactgctgtcgccatgcatgttgctgccaactctatccaaaacaggccgccaggctaccccaatatgaatcaagggggcatgatgggaactggacctccttatggacaagggattaatagtatggctggcatgatcaaccctcagggacccccatattccatgggtggaaccatggccaacaattctgcagggatggcagccagcccagagatgatgggccttggggatgtaaagttaactccagccaccaaaatgaacaacaaggcagatgggacacccaagacagaatccaaatccaagaaatccagttcttctactacaaccaatgagaagatcaccaagttgtatgagctgggtggtgagcctgagaggaagatgtgggtggaccgttatctggccttcactgaggagaaggccatgggcatgacaaatctgcctgctgtgggtaggaaacctctggacctctatcgcctctatgtgtctgtgaaggagattggtggattgactcaggtcaacaagaacaaaaaatggcgggaacttgcaaccaacctcaatgtgggcacatcaagcagtgctgccagctccttgaaaaagcagtatatccagtgtctctatgcctttgaatgcaagattgaacggggagaagaccctcccccagacatctttgcagctgctgattccaagaagtcccagcccaagatccagcctccctctcctgcgggatcaggatctatgcaggggccccagactccccagtcaaccagcagttccatggcagaaggaggagacttaaagccaccaactccagcatccacaccacacagtcagatccccccattgccaggcatgagcaggagcaattcagttgggatccaggatgcctttaatgatggaagtgactccacattccagaagcggaattccatgactccaaaccctgggtatcagcccagtatgaatacctctgacatgatggggcgcatgtcctatgagccaaataaggatccttatggcagcatgaggaaagctccagggagtgatcccttcatgtcctcagggcagggccccaacggcgggatgggtgacccctacagtcgtgctgccggccctgggctaggaaatgtggcgatgggaccacgacagcactatccctatggaggtccttatgacagagtgaggacggagcctggaatagggcctgagggaaacatgagcactggggccccacagccgaatctcatgccttccaacccagactcggggatgtattctcctagccgctaccccccgcagcagcagcagcagcagcagcaacgacatgattcctatggcaatcagttctccacccaaggcaccccttctggcagccccttccccagccagcagactacaatgtatcaacagcaacagcagaattacaagcggccaatggatggcacatatggccctcctgccaagcggcacgaaggggagatgtacagcgtgccatacagcactgggcaggggcagcctcagcagcagcagttgcccccagcccagccccagcctgccagccagcaacaagctgcccagccttcccctcagcaagatgtatacaaccagtatggcaatgcctatcctgccactgccacagctgctactgagcgccgaccagcaggcggcccccagaaccaatttccattccagtttggccgagaccgtgtctctgcaccccctggcaccaatgcccagcaaaacatgccaccacaaatgatgggcggccccatacaggcatcagctgaggttgctcagcaaggcaccatgtggcaggggcgtaatgacatgacctataattatgccaacaggcagagcacgggctctgccccccagggccccgcctatcatggcgtgaaccgaacagatgaaatgctgcacacagatcagagggccaaccacgaaggctcgtggccttcccatggcacacgccagcccccatatggtccctctgcccctgtgccccccatgacaaggccccctccatctaactaccagcccccaccaagcatgcagaatcacattcctcaggtatccagccctgctcccctgccccggccaatggagaaccgcacctctcctagcaagtctccattcctgcactctgggatgaaaatgcagaaggcaggtcccccagtacctgcctcgcacatagcacctgcccctgtgcagccccccatgattcggcgggatatcaccttcccacctggctctgttgaagccacacagcctgtgttgaagcagaggaggcggctcacaatgaaagacattggaaccccggaggcatggcgggtaatgatgtccctcaagtctggtctcctggcagagagcacatgggcattagataccatcaacatcctgctgtatgatgacaacagcatcatgaccttcaacctcagtcagctcccagggttgctagagctccttgtagaatatttccgacgatgcctgattgagatctttggcattttaaaggagtatgaggtgggtgacccaggacagagaacgctactggatcctgggaggttcagcaaggtgtctagtccagctcccatggagggtggggaagaagaagaagaacttctaggtcctaaactagaagaggaagaagaagaggaagtagttgaaaatgatgaggagatagccttttcaggcaaggacaagccagcttcagagaatagtgaggagaagctgatcagtaagtttgacaagcttccagtaaagatcgtacagaagaatgatccatttgtggtggactgctcagataagcttgggcgtgtgcaggagtttgacagtggcctgctgcactggcggattggtgggggggacaccactgagcatatccagacccacttcgagagcaagacagagctgctgccttcccggcctcacgcaccctgcccaccagcccctcggaagcatgtgacaacagcagagggtacaccagggacaacagaccaggaggggcccccacctgatggacctccagaaaaacggatcacagccactatggatgacatgttgtctactcggtctagcaccttgaccgaggatggagctaagagttcagaggccatcaaggagagcagcaagtttccatttggcattagcccagcacagagccaccggaacatcaagatcctagaggacgaaccccacagtaaggatgagaccccactgtgtacccttctggactggcaggattctcttgccaagcgctgcgtctgtgtgtccaataccattcgaagcctgtcatttgtgccaggcaatgactttgagatgtccaaacacccagggctgctgctcatcctgggcaagctgatcctgctgcaccacaagcacccagaacggaagcaggcaccactaacttatgaaaaggaggaggaacaggaccaaggggtgagctgcaacaaagtggagtggtggtgggactgcttggagatgctccgggaaaacaccttggttacactcgccaacatctcggggcagttggacctatctccataccccgagagcatttgcctgcctgtcctggacggactcctacactgggcagtttgcccttcagctgaagcccaggaccccttttccaccctgggccccaatgccgtcctttccccgcagagactggtcttggaaaccctcagcaaactcagcatccaggacaacaatgtggacctgattctggccacaccccccttcagccgcctggagaagttgtatagcactatggtgcgcttcctcagtgaccgaaagaacccggtgtgccgggagatggctgtggtactgctggccaacctggctcagggggacagcctggcagctcgtgccattgcagtgcagaagggcagtatcggcaacctcctgggcttcctagaggacagccttgccgccacacagttccagcagagccaggccagcctcctccacatgcagaacccaccctttgagccaactagtgtggacatgatgcggcgggctgcccgcgcgctgcttgccttggccaaggtggacgagaaccactcagagtttactctgtacgaatcacggctgttggacatctcggtatcaccgttgatgaactcattggtttcacaagtcatttgtgatgtactgtttttgattggccagtcatgacagccgtgggacacctcccccccccgtgtgtgtgtgcgtgtgtggagaacttagaaactgactgttgccctttatttatgcaaaaccacctcagaatccagtttaccctgtgctgtccagcttctcccttgggaaaaagtctctcctgtttctctctcctccttccacctcccctccctccatcacctcacgcctttctgttccttgtcctcaccttactcccctcaggaccctaccccaccctctttgaaaagacaaagctctgcctacatagaagactttttttattttaaccaaagttactgttgtttacagtgagtttggggaaaaaaaataaaataaaaatggctttcccagtccttgcatcaacgggatgccacatttcataactgtttttaatggtaaaaaaaaaaaaaaaaaatacaaaaaaaaattctgaaggacaaaaaaggtgactgctgaactgtgtgtggtttattgttgtacattcacaatcttgcaggagccaagaagttcgcagttgtgaacagaccctgttcactggagaggcctgtgcagtagagtgtagaccctttcatgtactgtactgtacacctgatactgtaaacatactgtaataataatgtctcacatggaaacagaaaacgctgggtcagcagcaagctgtagtttttaaaaatgtttttagttaaacgttgaggagaaaaaaaaaaaaggcttttcccccaaagtatcatgtgtgaacctacaacaccctgacctctttctctcctccttgattgtatgaataaccctgagatcacctcttagaactggttttaacctttagctgcagcggctacgctgccacgtgtgtatatatatgacgttgtacattgcacatacccttggatccccacagtttggtcctcctcccagctacccctttatagtatgacgagttaacaagttggtgacctgcacaaagcgagacacagctatttaatctcttgccagatatcgcccctcttggtgcgatgctgtacaggtctctgtaaaaagtccttgctgtctcagcagccaatcaacttatagtttatttttttctgggtttttgttttgttttgttttctttctaatcgaggtgtgaaaaagttctaggttcagttgaagttctgatgaagaaacacaattgagattttttcagtgataaaatctgcatatttgtatttcaacaatgtagctaaaacttgatgtaaattcctcctttttttccttttttggcttaatgaatatcatttattcagtatgaaatctttatactatatgttccacgtgttaagaataaatgtacattaaatcttggtaagacttt

SEQ ID NO: 74 - DNA, 8584 bp, Homo sapiens
cagaaagcggagagtcacagcggggccaggccctggggagcggagcctccaccgcccccctcattcccaggcaagggcttggggggaatgagccgggagagccgggtcccgagcctacagagccgggagcagctgagccgccggcgcctcggccgccgccgccgcctcctcctcctccgccgccgccagcccggagcctgagccggcggggcgggggggagaggagcgagcgcagcgcagcagcggagccccgcgaggcccgcccgggcgggtggggagggcagcccgggggactgggccccggggcggggtgggagggggggagaagacgaagacagggccgggtctctccgcggacgagacagcggggatcatggccgcgcaggtcgcccccgccgccgccagcagcctgggcaacccgccgccgccgccgccctcggagctgaagaaagccgagcagcagcagcgggaggaggcggggggcgaggcggcggcggcggcagcggccgagcgcggggaaatgaaggcagccgccgggcaggaaagcgagggccccgccgtggggccgccgcagccgctgggaaaggagctgcaggacggggccgagagcaatgggggtggcggcggcggcggagccggcagcggcggcgggcccggcgcggagccggacctgaagaactcgaacgggaacgcgggccctaggcccgccctgaacaataacctcacggagccgcccggcggcggcggtggcggcagcagcgatggggtgggggcgcctcctcactcagccgcggccgccttgccgcccccagcctacggcttcgggcaaccctacggccggagcccgtctgccgtcgccgccgccgcggccgccgtcttccaccaacaacatggcggacaacaaagccctggcctggcagcgctgcagagcggcggcggcgggggcctggagccctacgcggggccccagcagaactctcacgaccacggcttccccaaccaccagtacaactcctactaccccaaccgcagcgcctaccccccgcccgccccggcctacgcgctgagctccccgagaggtggcactccgggctccggcgcggcggcggctgccggctccaagccgcctccctcctccagcgcctccgcctcctcgtcgtcttcgtccttcgctcagcagcgcttcggggccatggggggaggcggcccctccgcggccggcgggggaactccccagcccaccgccacccccaccctcaaccaactgctcacgtcgcccagctcggcccggggctaccagggctaccccgggggcgactacagtggcgggccccaggacgggggcgccggcaagggcccggcggacatggcctcgcagtgttggggggctgcggcggcggcagctgcggcggcggccgcctcgggaggggcccaacaaaggagccaccacgcgcccatgagccccgggagcagcggcggcggggggcagccgctcgcccggacccctcagccatccagtccaatggatcagatgggcaagatgagacctcagccatatggcgggactaacccatactcgcagcaacagggacctccgtcaggaccgcagcaaggacatgggtacccagggcagccatacgggtcccagaccccgcagcggtacccgatgaccatgcagggccgggcgcagagtgccatgggcggcctctcttatacacagcagattcctccttatggacaacaaggccccagcgggtatggtcaacagggccagactccatattacaaccagcaaagtcctcaccctcagcagcagcagccaccctactcccagcaaccaccgtcccagacccctcatgcccaaccttcgtatcagcagcagccacagtctcaaccaccacagctccagtcctctcagcctccatactcccagcagccatcccagcctccacatcagcagtccccggctccatacccctcccagcagtcgacgacacagcagcacccccagagccagcccccctactcacagccacaggctcagtctccttaccagcagcagcaacctcagcagccagcaccctcgacgctctcccagcaggctgcgtatcctcagccccagtctcagcagtcccagcaaactgcctattcccagcagcgcttccctccaccgcaggagctatctcaagattcatttgggtctcaggcatcctcagccccctcaatgacctccagtaagggagggcaagaagatatgaacctgagccttcagtcaagaccctccagcttgcctgatctatctggttcaatagatgacctccccatggggacagaaggagctctgagtcctggagtgagcacatcagggatttccagcagccaaggagagcagagtaatccagctcagtctcctttctctcctcatacctcccctcacctgcctggcatccgaggcccttccccgtcccctgttggctctcccgccagtgttgctcagtctcgctcaggaccactctcgcctgctgcagtgccaggcaaccagatgccacctcggccacccagtggccagtcggacagcatcatgcatccttccatgaaccaatcaagcattgcccaagatcgaggttatatgcagaggaacccccagatgccccagtacagttccccccagcccggctcagccttatctccgcgtcagccttccggaggacagatacacacaggcatgggctcctaccagcagaactccatggggagctatggtccccaggggggtcagtatggcccacaaggtggctaccccaggcagccaaactataatgccttgcccaatgccaactaccccagtgcaggcatggctggaggcataaaccccatgggtgccggaggtcaaatgcatggacagcctggcatcccaccttatggcacactccctccagggaggatgagtcacgcctccatgggcaaccggccttatggccctaacatggccaatatgccacctcaggttgggtcagggatgtgtcccccaccagggggcatgaaccggaaaacccaagaaactgctgtcgccatgcatgttgctgccaactctatccaaaacaggccgccaggctaccccaatatgaatcaagggggcatgatgggaactggacctccttatggacaagggattaatagtatggctggcatgatcaaccctcagggacccccatattccatgggtggaaccatggccaacaattctgcagggatggcagccagcccagagatgatgggccttggggatgtaaagttaactccagccaccaaaatgaacaacaaggcagatgggacacccaagacagaatccaaatccaagaaatccagttcttctactacaaccaatgagaagatcaccaagttgtatgagctgggtggtgagcctgagaggaagatgtgggtggaccgttatctggccttcactgaggagaaggccatgggcatgacaaatctgcctgctgtgggtaggaaacctctggacctctatcgcctctatgtgtctgtgaaggagattggtggattgactcaggtcaacaagaacaaaaaatggcgggaacttgcaaccaacctcaatgtgggcacatcaagcagtgctgccagctccttgaaaaagcagtatatccagtgtctctatgcctttgaatgcaagattgaacggggagaagaccctcccccagacatctttgcagctgctgattccaagaagtcccagcccaagatccagcctccctctcctgcgggatcaggatctatgcaggggccccagactccccagtcaaccagcagttccatggcagaaggaggagacttaaagccaccaactccagcatccacaccacacagtcagatccccccattgccaggcatgagcaggagcaattcagttgggatccaggatgcctttaatgatggaagtgactccacattccagaagcggaattccatgactccaaaccctgggtatcagcccagtatgaatacctctgacatgatggggcgcatgtcctatgagccaaataaggatccttatggcagcatgaggaaagctccagggagtgatcccttcatgtcctcagggcagggccccaacggcgggatgggtgacccctacagtcgtgctgccggccctgggctaggaaatgtggcgatgggaccacgacagcactatccctatggaggtccttatgacagagtgaggacggagcctggaatagggcctgagggaaacatgagcactggggccccacagccgaatctcatgccttccaacccagactcggggatgtattctcctagccgctaccccccgcagcagcagcagcagcagcagcaacgacatgattcctatggcaatcagttctccacccaaggcaccccttctggcagccccttccccagccagcagactacaatgtatcaacagcaacagcagaattacaagcggccaatggatggcacatatggccctcctgccaagcggcacgaaggggagatgtacagcgtgccatacagcactgggcaggggcagcctcagcagcagcagttgcccccagcccagccccagcctgccagccagcaacaagctgcccagccttcccctcagcaagatgtatacaaccagtatggcaatgcctatcctgccactgccacagctgctactgagcgccgaccagcaggcggcccccagaaccaatttccattccagtttggccgagaccgtgtctctgcaccccctggcaccaatgcccagcaaaacatgccaccacaaatgatgggcggccccatacaggcatcagctgaggttgctcagcaaggcaccatgtggcaggggcgtaatgacatgacctataattatgccaacaggcagagcacgggctctgccccccagggccccgcctatcatggcgtgaaccgaacagatgaaatgctgcacacagatcagagggccaaccacgaaggctcgtggccttcccatggcacacgccagcccccatatggtccctctgcccctgtgccccccatgacaaggccccctccatctaactaccagcccccaccaagcatgcagaatcacattcctcaggtatccagccctgctcccctgccccggccaatggagaaccgcacctctcctagcaagtctccattcctgcactctgggatgaaaatgcagaaggcaggcccccagtacctgcctcgcacatagcacctgcccctgtgcagccccccatgattcggcgggatatcaccttcccacctggctctgttgaagccacacagcctgtgttgaagcagaggaggcggctcacaatgaaagacattggaaccccggaggcatggcgggtaatgatgtccctcaagtctggtctcctggcagagagcacatgggcattagataccatcaacatcctgctgtatgatgacaacagcatcatgaccttcaacctcagtcagctcccagggttgctagagctccttgtagaatatttccgacgatgcctgattgagatctttggcattttaaaggagtatgaggtgggtgacccaggacagagaacgctactggatcctgggaggttcagcaaggtgtctagtccagctcccatggagggtggggaagaagaagaagaacttctaggtcctaaactagaagaggaagaagaagaggaagtagttgaaaatgatgaggagatagccttttcaggcaaggacaagccagcttcagagaatagtgaggagaagctgatcagtaagtttgacaagcttccagtaaagatcgtacagaagaatgatccatttgtggtggactgctcagataagcttgggcgtgtgcaggagtttgacagtggcctgctgcactggcggattggtgggggggacaccactgagcatatccagacccacttcgagagcaagacagagctgctgccttcccggcctcacgcaccctgcccaccagcccctcggaagcatgtgacaacagcagagggtacaccagggacaacagaccaggaggggcccccacctgatggacctccagaaaaacggatcacagccactatggatgacatgttgtctactcggtctagcaccttgaccgaggatggagctaagagttcagaggccatcaaggagagcagcaagtttccatttggcattagcccagcacagagccaccggaacatcaagatcctagaggacgaaccccacagtaaggatgagaccccactgtgtacccttctggactggcaggattctcttgccaagcgctgcgtctgtgtgtccaataccattcgaagcctgtcatttgtgccaggcaatgactttgagatgtccaaacacccagggctgctgctcatcctgggcaagctgatcctgctgcaccacaagcacccagaacggaagcaggcaccactaacttatgaaaaggaggaggaacaggaccaaggggtgagctgcaacaaagtggagtggtggtgggactgcttggagatgctccgggaaaacaccttggttacactcgccaacatctcggggcagttggacctatctccataccccgagagcatttgcctgcctgtcctggacggactcctacactgggcagtttgcccttcagctgaagcccaggaccccttttccaccctgggccccaatgccgtcctttccccgcagagactggtcttggaaaccctcagcaaactcagcatccaggacaacaatgtggacctgattctggccacaccccccttcagccgcctggagaagttgtatagcactatggtgcgcttcctcagtgaccgaaagaacccggtgtgccgggagatggctgtggtactgctggccaacctggctcagggggacagcctggcagctcgtgccattgcagtgcagaagggcagtatcggcaacctcctgggcttcctagaggacagccttgccgccacacagttccagcagagccaggccagcctcctccacatgcagaacccaccctttgagccaactagtgtggacatgatgcggcgggctgcccgcgcgctgcttgccttggccaaggtggacgagaaccactcagagtttactctgtacgaatcacggctgttggacatctcggtatcaccgttgatgaactcattggtttcacaagtcatttgtgatgtactgtttttgattggccagtcatgacagccgtgggacacctcccccccccgtgtgtgtgtgcgtgtgtggagaacttagaaactgactgttgccctttatttatgcaaaaccacctcagaatccagtttaccctgtgctgtccagcttctcccttgggaaaaagtctctcctgtttctctctcctccttccacctcccctccctccatcacctcacgcctttctgttccttgtcctcaccttactcccctcaggaccctaccccaccctctttgaaaagacaaagctctgcctacatagaagactttttttattttaaccaaagttactgttgtttacagtgagtttggggaaaaaaaataaaataaaaatggctttcccagtccttgcatcaacgggatgccacatttcataactgtttttaatggtaaaaaaaaaaaaaaaaaatacaaaaaaaaattctgaaggacaaaaaaggtgactgctgaactgtgtgtggtttattgttgtacattcacaatcttgcaggagccaagaagttcgcagttgtgaacagaccctgttcactggagaggcctgtgcagtagagtgtagaccctttcatgtactgtactgtacacctgatactgtaaacatactgtaataataatgtctcacatggaaacagaaaacgctgggtcagcagcaagctgtagtttttaaaaatgtttttagttaaacgttgaggagaaaaaaaaaaaaggcttttcccccaaagtatcatgtgtgaacctacaacaccctgacctctttctctcctccttgattgtatgaataaccctgagatcacctcttagaactggttttaacctttagctgcagcggctacgctgccacgtgtgtatatatatgacgttgtacattgcacatacccttggatccccacagtttggtcctcctcccagctacccctttatagtatgacgagttaacaagttggtgacctgcacaaagcgagacacagctatttaatctcttgccagatatcgcccctcttggtgcgatgctgtacaggtctctgtaaaaagtccttgctgtctcagcagccaatcaacttatagtttatttttttctgggtttttgttttgttttgttttctttctaatcgaggtgtgaaaaagttctaggttcagttgaagttctgatgaagaaacacaattgagattttttcagtgataaaatctgcatatttgtatttcaacaatgtagctaaaacttgatgtaaattcctcctttttttccttttttggcttaatgaatatcatttattcagtatgaaatctttatactatatgttccacgtgttaagaataaatgtacattaaatcttggtaagacttt

SEQ ID NO: 75 - DNA, 8591 bp, Homo sapiens
cagaaagcggagagtcacagcggggccaggccctggggagcggagcctccaccgcccccctcattcccaggcaagggcttggggggaatgagccgggagagccgggtcccgagcctacagagccgggagcagctgagccgccggcgcctcggccgccgccgccgcctcctcctcctccgccgccgccagcccggagcctgagccggcggggcgggggggagaggagcgagcgcagcgcagcagcggagccccgcgaggcccgcccgggcgggtggggagggcagcccgggggactgggccccggggcggggtgggagggggggagaagacgaagacagggccgggtctctccgcggacgagacagcggggatcatggccgcgcaggtcgcccccgccgccgccagcagcctgggcaacccgccgccgccgccgccgccgccctcggagctgaagaaagccgagcagcagcagcgggaggaggcggggggcgaggcggcggcggcggcagcggccgagcgcggggaaatgaaggcagccgccgggcaggaaagcgagggccccgccgtggggccgccgcagccgctgggaaaggagctgcaggacggggccgagagcaatgggggtggcggcggcggcggagccggcagcggcggcgggcccggcgcggagccggacctgaagaactcgaacgggaacgcgggccctaggcccgccctgaacaataacctcacggagccgcccggcggcggcggtggcggcagcagcgatggggtgggggcgcctcctcactcagccgcggccgccttgccgcccccagcctacggcttcgggcaaccctacggccggagcccgtctgccgtcgccgccgccgcggccgccgtcttccaccaacaacatggcggacaacaaagccctggcctggcagcgctgcagagcggcggcggcgggggcctggagccctacgcggggccccagcagaactctcacgaccacggcttccccaaccaccagtacaactcctactaccccaaccgcagcgcctaccccccgcccgccccggcctacgcgctgagctccccgagaggtggcactccgggctccggcgcggcggcggctgccggctccaagccgcctccctcctccagcgcctccgcctcctcgtcgtcttcgtccttcgctcagcagcgcttcggggccatggggggaggcggcccctccgcggccggcgggggaactccccagcccaccgccacccccaccctcaaccaactgctcacgtcgcccagctcggcccggggctaccagggctaccccgggggcgactacagtggcgggccccaggacgggggcgccggcaagggcccggcggacatggcctcgcagtgttggggggctgcggcggcggcagctgcggcggcggccgcctcgggaggggcccaacaaaggagccaccacgcgcccatgagccccgggagcagcggcggcggggggcagccgctcgcccggacccctcagccatccagtccaatggatcagatgggcaagatgagacctcagccatatggcgggactaacccatactcgcagcaacagggacctccgtcaggaccgcagcaaggacatgggtacccagggcagccatacgggtcccagaccccgcagcggtacccgatgaccatgcagggccgggcgcagagtgccatgggcggcctctcttatacacagcagattcctccttatggacaacaaggccccagcgggtatggtcaacagggccagactccatattacaaccagcaaagtcctcaccctcagcagcagcagccaccctactcccagcaaccaccgtcccagacccctcatgcccaaccttcgtatcagcagcagccacagtctcaaccaccacagctccagtcctctcagcctccatactcccagcagccatcccagcctccacatcagcagtccccggctccatacccctcccagcagtcgacgacacagcagcacccccagagccagcccccctactcacagccacaggctcagtctccttaccagcagcagcaacctcagcagccagcaccctcgacgctctcccagcaggctgcgtatcctcagccccagtctcagcagtcccagcaaactgcctattcccagcagcgcttccctccaccgcaggagctatctcaagattcatttgggtctcaggcatcctcagccccctcaatgacctccagtaagggagggcaagaagatatgaacctgagccttcagtcaagaccctccagcttgcctgatctatctggttcaatagatgacctccccatggggacagaaggagctctgagtcctggagtgagcacatcagggatttccagcagccaaggagagcagagtaatccagctcagtctcctttctctcctcatacctcccctcacctgcctggcatccgaggcccttccccgtcccctgttggctctcccgccagtgttgctcagtctcgctcaggaccactctcgcctgctgcagtgccaggcaaccagatgccacctcggccacccagtggccagtcggacagcatcatgcatccttccatgaaccaatcaagcattgcccaagatcgaggttatatgcagaggaacccccagatgccccagtacagttccccccagcccggctcagccttatctccgcgtcagccttccggaggacagatacacacaggcatgggctcctaccagcagaactccatggggagctatggtccccaggggggtcagtatggcccacaaggtggctaccccaggcagccaaactataatgccttgcccaatgccaactaccccagtgcaggcatggctggaggcataaaccccatgggtgccggaggtcaaatgcatggacagcctggcatcccaccttatggcacactccctccagggaggatgagtcacgcctccatgggcaaccggccttatggccctaacatggccaatatgccacctcaggttgggtcagggatgtgtcccccaccagggggcatgaaccggaaaacccaagaaactgctgtcgccatgcatgttgctgccaactctatccaaaacaggccgccaggctaccccaatatgaatcaagggggcatgatgggaactggacctccttatggacaagggattaatagtatggctggcatgatcaaccctcagggacccccatattccatgggtggaaccatggccaacaattctgcagggatggcagccagcccagagatgatgggccttggggatgtaaagttaactccagccaccaaaatgaacaacaaggcagatgggacacccaagacagaatccaaatccaagaaatccagttcttctactacaaccaatgagaagatcaccaagttgtatgagctgggtggtgagcctgagaggaagatgtgggtggaccgttatctggccttcactgaggagaaggccatgggcatgacaaatctgcctgctgtgggtaggaaacctctggacctctatcgcctctatgtgtctgtgaaggagattggtggattgactcaggtcaacaagaacaaaaaatggcgggaacttgcaaccaacctcaatgtgggcacatcaagcagtgctgccagctccttgaaaaagcagtatatccagtgtctctatgcctttgaatgcaagattgaacggggagaagaccctcccccagacatctttgcagctgctgattccaagaagtcccagcccaagatccagcctccctctcctgcgggatcaggatctatgcaggggccccagactccccagtcaaccagcagttccatggcagaaggaggagacttaaagccaccaactccagcatccacaccacacagtcagatccccccattgccaggcatgagcaggagcaattcagttgggatccaggatgcctttaatgatggaagtgactccacattccagaagcggaattccatgactccaaaccctgggtatcagcccagtatgaatacctctgacatgatggggcgcatgtcctatgagccaaataaggatccttatggcagcatgaggaaagctccagggagtgatcccttcatgtcctcagggcagggccccaacggcgggatgggtgacccctacagtcgtgctgccggccctgggctaggaaatgtggcgatgggaccacgacagcactatccctatggaggtccttatgacagagtgaggacggagcctggaatagggcctgagggaaacatgagcactggggccccacagccgaatctcatgccttccaacccagactcggggatgtattctcctagccgctaccccccgcagcagcagcagcagcagcagcaacgacatgattcctatggcaatcagttctccacccaaggcaccccttctggcagccccttccccagccagcagactacaatgtatcaacagcaacagcagaattacaagcggccaatggatggcacatatggccctcctgccaagcggcacgaaggggagatgtacagcgtgccatacagcactgggcaggggcagcctcagcagcagcagttgcccccagcccagccccagcctgccagccagcaacaagctgcccagccttcccctcagcaagatgtatacaaccagtatggcaatgcctatcctgccactgccacagctgctactgagcgccgaccagcaggcggcccccagaaccaatttccattccagtttggccgagaccgtgtctctgcaccccctggcaccaatgcccagcaaaacatgccaccacaaatgatgggcggccccatacaggcatcagctgaggttgctcagcaaggcaccatgtggcaggggcgtaatgacatgacctataattatgccaacaggcagagcacgggctctgccccccagggccccgcctatcatggcgtgaaccgaacagatgaaatgctgcacacagatcagagggccaaccacgaaggctcgtggccttcccatggcacacgccagcccccatatggtccctctgcccctgtgccccccatgacaaggccccctccatctaactaccagcccccaccaagcatgcagaatcacattcctcaggtatccagccctgctcccctgccccggccaatggagaaccgcacctctcctagcaagtctccattcctgcactctgggatgaaaatgcagaaggcaggtcccccagtacctgcctcgcacatagcacctgcccctgtgcagccccccatgattcggcgggatatcaccttcccacctggctctgttgaagccacacagcctgtgttgaagcagaggaggcggctcacaatgaaagacattggaaccccggaggcatggcgggtaatgatgtccctcaagtctggtctcctggcagagagcacatgggcattagataccatcaacatcctgctgtatgatgacaacagcatcatgaccttcaacctcagtcagctcccagggttgctagagctccttgtagaatatttccgacgatgcctgattgagatctttggcattttaaaggagtatgaggtgggtgacccaggacagagaacgctactggatcctgggaggttcagcaaggtgtctagtccagctcccatggagggtggggaagaagaagaagaacttctaggtcctaaactagaagaggaagaagaagaggaagtagttgaaaatgatgaggagatagccttttcaggcaaggacaagccagcttcagagaatagtgaggagaagctgatcagtaagtttgacaagcttccagtaaagatcgtacagaagaatgatccatttgtggtggactgctcagataagcttgggcgtgtgcaggagtttgacagtggcctgctgcactggcggattggtgggggggacaccactgagcatatccagacccacttcgagagcaagacagagctgctgccttcccggcctcacgcaccctgcccaccagcccctcggaagcatgtgacaacagcagagggtacaccagggacaacagaccaggaggggcccccacctgatggacctccagaaaaacggatcacagccactatggatgacatgttgtctactcggtctagcaccttgaccgaggatggagctaagagttcagaggccatcaaggagagcagcaagtttccatttggcattagcccagcacagagccaccggaacatcaagatcctagaggacgaaccccacagtaaggatgagaccccactgtgtacccttctggactggcaggattctcttgccaagcgctgcgtctgtgtgtccaataccattcgaagcctgtcatttgtgccaggcaatgactttgagatgtccaaacacccagggctgctgctcatcctgggcaagctgatcctgctgcaccacaagcacccagaacggaagcaggcaccactaacttatgaaaaggaggaggaacaggaccaaggggtgagctgcaacaaagtggagtggtggtgggactgcttggagatgctccgggaaaacaccttggttacactcgccaacatctcggggcagttggacctatctccataccccgagagcatttgcctgcctgtcctggacggactcctacactgggcagtttgcccttcagctgaagcccaggaccccttttccaccctgggccccaatgccgtcctttccccgcagagactggtcttggaaaccctcagcaaactcagcatccaggacaacaatgtggacctgattctggccacaccccccttcagccgcctggagaagttgtatagcactatggtgcgcttcctcagtgaccgaaagaacccggtgtgccgggagatggctgtggtactgctggccaacctggctcagggggacagcctggcagctcgtgccattgcagtgcagaagggcagtatcggcaacctcctgggcttcctagaggacagccttgccgccacacagttccagcagagccaggccagcctcctccacatgcagaacccaccctttgagccaactagtgtggacatgatgcggcgggctgcccgcgcgctgcttgccttggccaaggtggacgagaaccactcagagtttactctgtacgaatcacggctgttggacatctcggtatcaccgttgatgaactcattggtttcacaagtcatttgtgatgtactgtttttgattggccagtcatgacagccgtgggacacctcccccccccgtgtgtgtgtgcgtgtgtggagaacttagaaactgactgttgccctttatttatgcaaaaccacctcagaatccagtttaccctgtgctgtccagcttctcccttgggaaaaagtctctcctgtttctctctcctccttccacctcccctccctccatcacctcacgcctttctgttccttgtcctcaccttactcccctcaggaccctaccccaccctctttgaaaagacaaagctctgcctacatagaagactttttttattttaaccaaagttactgttgtttacagtgagtttggggaaaaaaaataaaataaaaatggctttcccagtccttgcatcaacgggatgccacatttcataactgtttttaatggtaaaaaaaaaaaaaaaaaatacaaaaaaaaattctgaaggacaaaaaaggtgactgctgaactgtgtgtggtttattgttgtacattcacaatcttgcaggagccaagaagttcgcagttgtgaacagaccctgttcactggagaggcctgtgcagtagagtgtagaccctttcatgtactgtactgtacacctgatactgtaaacatactgtaataataatgtctcacatggaaacagaaaacgctgggtcagcagcaagctgtagtttttaaaaatgtttttagttaaacgttgaggagaaaaaaaaaaaaggcttttcccccaaagtatcatgtgtgaacctacaacaccctgacctctttctctcctccttgattgtatgaataaccctgagatcacctcttagaactggttttaacctttagctgcagcggctacgctgccacgtgtgtatatatatgacgttgtacattgcacatacccttggatccccacagtttggtcctcctcccagctacccctttatagtatgacgagttaacaagttggtgacctgcacaaagcgagacacagctatttaatctcttgccagatatcgcccctcttggtgcgatgctgtacaggtctctgtaaaaagtccttgctgtctcagcagccaatcaacttatagtttatttttttctgggtttttgttttgttttgttttctttctaatcgaggtgtgaaaaagttctaggttcagttgaagttctgatgaagaaacacaattgagattttttcagtgataaaatctgcatatttgtatttcaacaatgtagctaaaacttgatgtaaattcctcctttttttccttttttggcttaatgaatatcatttattcagtatgaaatctttatactatatgttccacgtgttaagaataaatgtacattaaatcttggtaagacttt

SEQ ID NO: 76 - DNA, 8584 bp, Homo sapiens
cagaaagcggagagtcacagcggggccaggccctggggagcggagcctccaccgcccccctcattcccaggcaagggcttggggggaatgagccgggagagccgggtcccgagcctacagagccgggagcagctgagccgccggcgcctcggccgccgccgccgcctcctcctcctccgccgccgccagcccggagcctgagccggcggggcgggggggagaggagcgagcgcagcgcagcagcggagccccgcgaggcccgcccgggcgggtggggagggcagcccgggggactgggccccggggcggggtgggagggggggagaagacgaagacagggccgggtctctccgcggacgagacagcggggatcatggccgcgcaggtcgcccccgccgccgccagcagcctgggcaacccgccgccgccgccgccctcggagctgaagaaagccgagcagcagcagcgggaggaggcggggggcgaggcggcggcggcggcagcggccgagcgcggggaaatgaaggcagccgccgggcaggaaagcgagggccccgccgtggggccgccgcagccgctgggaaaggagctgcaggacggggccgagagcaatgggggtggcggcggcggcggagccggcagcggcggcgggcccggcgcggagccggacctgaagaactcgaacgggaacgcgggccctaggcccgccctgaacaataacctcacggagccgcccggcggcggcggtggcggcagcagcgatggggtgggggcgcctcctcactcagccgcggccgccttgccgcccccagcctacggcttcgggcaaccctacggccggagcccgtctgccgtcgccgccgccgcggccgccgtcttccaccaacaacatggcggacaacaaagccctggcctggcagcgctgcagagcggcggcggcgggggcctggagccctacgcggggccccagcagaactctcacgaccacggcttccccaaccaccagtacaactcctactaccccaaccgcagcgcctaccccccgcccgccccggcctacgcgctgagctccccgagaggtggcactccgggctccggcgcggcggcggctgccggctccaagccgcctccctcctccagcgcctccgcctcctcgtcgtcttcgtccttcgctcagcagcgcttcggggccatggggggaggcggcccctccgcggccggcgggggaactccccagcccaccgccacccccaccctcaaccaactgctcacgtcgcccagctcggcccggggctaccagggctaccccgggggcgactacagtggcgggccccaggacgggggcgccggcaagggcccggcggacatggcctcgcagtgttggggggctgcggcggcggcagctgcggcggcggccgcctcgggaggggcccaacaaaggagccaccacgcgcccatgagccccgggagcagcggcggcggggggcagccgctcgcccggacccctcagccatccagtccaatggatcagatgggcaagatgagacctcagccatatggcgggactaaccatactcgcagcaacagggacctccgtcaggaccgcagcaaggacatgggtacccagggcagccatacgggtcccagaccccgcagcggtacccgatgaccatgcagggccgggcgcagagtgccatgggcggcctctcttatacacagcagattcctccttatggacaacaaggccccagcgggtatggtcaacagggccagactccatattacaaccagcaaagtcctcaccctcagcagcagcagccaccctactcccagcaaccaccgtcccagacccctcatgcccaaccttcgtatcagcagcagccacagtctcaaccaccacagctccagtcctctcagcctccatactcccagcagccatcccagcctccacatcagcagtccccggctccatacccctcccagcagtcgacgacacagcagcacccccagagccagcccccctactcacagccacaggctcagtctccttaccagcagcagcaacctcagcagccagcaccctcgacgctctcccagcaggctgcgtatcctcagccccagtctcagcagtcccagcaaactgcctattcccagcagcgcttccctccaccgcaggagctatctcaagattcatttgggtctcaggcatcctcagccccctcaatgacctccagtaagggagggcaagaagatatgaacctgagccttcagtcaagaccctccagcttgcctgatctatctggttcaatagatgacctccccatggggacagaaggagctctgagtcctggagtgagcacatcagggatttccagcagccaaggagagcagagtaatccagctcagtctcctttctctcctcatacctcccctcacctgcctggcatccgaggcccttccccgtcccctgttggctctcccgccagtgttgctcagtctcgctcaggaccactctcgcctgctgcagtgccaggcaaccagatgccacctcggccacccagtggccagtcggacagcatcatgcatccttccatgaaccaatcaagcattgcccaagatcgaggttatatgcagaggaacccccagatgccccagtacagttccccccagcccggctcagccttatctccgcgtcagccttccggaggacagatacacacaggcatgggctcctaccagcagaactccatggggagctatggtccccaggggggtcagtatggcccacaaggtggctaccccaggcagccaaactataatgccttgcccaatgccaactaccccagtgcaggcatggctggaggcataaaccccatgggtgccggaggtcaaatgcatggacagcctggcatcccaccttatggcacactccctccagggaggatgagtcacgcctccatgggcaaccggccttatggccctaacatggccaatatgccacctcaggttgggtcagggatgtgtcccccaccagggggcatgaaccggaaaacccaagaaactgctgtcgccatgcatgttgctgccaactctatccaaaacaggccgccaggctaccccaatatgaatcaagggggcatgatgggaactggacctccttatggacaagggattaatagtatggctggcatgatcaaccctcagggacccccatattccatgggtggaaccatggccaacaattctgcagggatggcagccagcccagagatgatgggccttggggatgtaaagttaactccagccaccaaaatgaacaacaaggcagatgggacacccaagacagaatccaaatccaagaaatccagttcttctactacaaccaatgagaagatcaccaagttgtatgagctgggtggtgagcctgagaggaagatgtgggtggaccgttatctggccttcactgaggagaaggccatgggcatgacaaatctgcctgctgtgggtaggaaacctctggacctctatcgcctctatgtgtctgtgaaggagattggtggattgactcaggtcaacaagaacaaaaaatggcgggaacttgcaaccaacctcaatgtgggcacatcaagcagtgctgccagctccttgaaaaagcagtatatccagtgtctctatgcctttgaatgcaagattgaacggggagaagaccctcccccagacatctttgcagctgctgattccaagaagtcccagcccaagatccagcctccctctcctgcgggatcaggatctatgcaggggccccagactccccagtcaaccagcagttccatggcagaaggaggagacttaaagccaccaactccagcatccacaccacacagtcagatccccccattgccaggcatgagcaggagcaattcagttgggatccaggatgcctttaatgatggaagtgactccacattccagaagcggaattccatgactccaaaccctgggtatcagcccagtatgaatacctctgacatgatggggcgcatgtcctatgagccaaataaggatccttatggcagcatgaggaaagctccagggagtgatcccttcatgtcctcagggcagggccccaacggcgggatgggtgacccctacagtcgtgctgccggccctgggctaggaaatgtggcgatgggaccacgacagcactatccctatggaggtccttatgacagagtgaggacggagcctggaatagggcctgagggaaacatgagcactggggccccacagccgaatctcatgccttccaacccagactcggggatgtattctcctagccgctaccccccgcagcagcagcagcagcagcagcaacgacatgattcctatggcaatcagttctccacccaaggcaccccttctggcagccccttccccagccagcagactacaatgtatcaacagcaacagcagaattacaagcggccaatggatggcacatatggccctcctgccaagcggcacgaaggggagatgtacagcgtgccatacagcactgggcaggggcagcctcagcagcagcagttgcccccagcccagccccagcctgccagccagcaacaagctgcccagccttcccctcagcaagatgtatacaaccagtatggcaatgcctatcctgccactgccacagctgctactgagcgccgaccagcaggcggcccccagaaccaatttccattccagtttggccgagaccgtgtctctgcaccccctggcaccaatgcccagcaaaacatgccaccacaaatgatgggcggccccatacaggcatcagctgaggttgctcagcaaggcaccatgtggcaggggcgtaatgacatgacctataattatgccaacaggcagagcacgggctctgccccccagggccccgcctatcatggcgtgaaccgaacagatgaaatgctgcacacagatcagagggccaaccacgaaggctcgtggccttcccatggcacacgccagcccccatatggtccctctgcccctgtgccccccatgacaaggccccctccatctaactaccagcccccaccaagcatgcagaatcacattcctcaggtatccagccctgctcccctgccccggccaatggagaaccgcacctctcctagcaagtctccattcctgcactctgggatgaaaatgcagaaggcaggtcccccagtacctgcctcgcacatagcacctgcccctgtgcagccccccatgattcggcgggatatcaccttcccacctggctctgttgaagccacacagcctgtgttgaagcagaggaggcggctcacaatgaaagacattggaaccccggaggcatggcgggtaatgatgtccctcaagtctggtctcctggcagagagcacatgggcattagataccatcaacatcctgctgtatgatgacaacagcatcatgaccttcaacctcagtcagctcccagggttgctagagctccttgtagaatatttccgacgatgcctgattgagatctttggcattttaaaggagtatgaggtgggtgacccaggacagagaacgctactggatcctgggaggttcagcaaggtgtctagtccagctcccatggagggtggggaagaagaagaagaacttctaggtcctaaactagaagaggaagaagaagaggaagtagttgaaaatgatgaggagatagccttttcaggcaaggacaagccagcttcagagaatagtgaggagaagctgatcagtaagtttgacaagcttccagtaaagatcgtacagaagaatgatccatttgtggtggactgctcagataagcttgggcgtgtgcaggagtttgacagtggcctgctgcactggcggattggtgggggggacaccactgagcatatccagacccacttcgagagcaagacagagctgctgccttcccggcctcacgcaccctgcccaccagcccctcggaagcatgtgacaacagcagagggtacaccagggacaacagaccaggaggggcccccacctgatggacctccagaaaaacggatcacagccactatggatgacatgttgtctactcggtctagcaccttgaccgaggatggagctaagagttcagaggccatcaaggagagcagcaagtttccatttggcattagcccagcacagagccaccggaacatcaagatcctagaggacgaaccccacagtaaggatgagaccccactgtgtacccttctggactggcaggattctcttgccaagcgctgcgtctgtgtgtccaataccattcgaagcctgtcatttgtgccaggcaatgactttgagatgtccaaacacccagggctgctgctcatcctgggcaagctgatcctgctgcaccacaagcacccagaacggaagcaggcaccactaacttatgaaaaggaggaggaacaggaccaaggggtgagctgcaacaaagtggagtggtggtgggactgcttggagatgctccgggaaaacaccttggttacactcgccaacatctcggggcagttggacctatctccataccccgagagcatttgcctgcctgtcctggacggactcctacactgggcagtttgcccttcagctgaagcccaggaccccttttccaccctgggccccaatgccgtcctttccccgcagagactggtcttggaaaccctcagcaaactcagcatccaggacaacaatgtggacctgattctggccacaccccccttcagccgcctggagaagttgtatagcactatggtgcgcttcctcagtgaccgaaagaacccggtgtgccgggagatggctgtggtactgctggccaacctggctcagggggacagcctggcagctcgtgccattgcagtgcagaagggcagtatcggcaacctcctgggcttcctagaggacagccttgccgccacacagttccagcagagccaggccagcctcctccacatgcagaacccaccctttgagccaactagtgtggacatgatgcggcgggctgcccgcgcgctgcttgccttggccaaggtggacgagaaccactcagagtttactctgtacgaatcacggctgttggacatctcggtatcaccgttgatgaactcattggtttcacaagtcatttgtgatgtactgtttttgattggccagtcatgacagccgtgggacacctcccccccccgtgtgtgtgtgcgtgtgtggagaacttagaaactgactgttgccctttatttatgcaaaaccacctcagaatccagtttaccctgtgctgtccagcttctcccttgggaaaaagtctctcctgtttctctctcctccttccacctcccctccctccatcacctcacgcctttctgttccttgtcctcaccttactcccctcaggaccctaccccaccctctttgaaaagacaaagctctgcctacatagaagactttttttattttaaccaaagttactgttgtttacagtgagtttggggaaaaaaaataaaataaaaatggctttcccagtccttgcatcaacgggatgccacatttcataactgtttttaatggtaaaaaaaaaaaaaaaaaatacaaaaaaaaattctgaaggacaaaaaaggtgactgctgaactgtgtgtggtttattgttgtacattcacaatcttgcaggagccaagaagttcgcagttgtgaacagaccctgttcactggagaggcctgtgcagtagagtgtagaccctttcatgtactgtactgtacacctgatactgtaaacatactgtaataataatgtctcacatggaaacagaaaacgctgggtcagcagcaagctgtagtttttaaaaatgtttttagttaaacgttgaggagaaaaaaaaaaaaggcttttcccccaaagtatcatgtgtgaacctacaacaccctgacctctttctctcctccttgattgtatgaataaccctgagatcacctcttagaactggttttaacctttagctgcagcggctacgctgccacgtgtgtatatatatgacgttgtacattgcacatacccttggatccccacagtttggtcctcctcccagctacccctttatagtatgacgagttaacaagttggtgacctgcacaaagcgagacacagctatttaatctcttgccagatatcgcccctcttggtgcgatgctgtacaggtctctgtaaaaagtccttgctgtctcagcagccaatcaacttatagtttatttttttctgggtttttgttttgttttgttttctttctaatcgaggtgtgaaaaagttctaggttcagttgaagttctgatgaagaaacacaattgagattttttcagtgataaaatctgcatatttgtatttcaacaatgtagctaaaacttgatgtaaattcctcctttttttccttttttggcttaatgaatatcatttattcagtatgaaatctttatactatatgttccacgtgttaagaataaatgtacattaaatcttggtaagacttt

SEQ ID NO: 77 - DNA, 8585 bp, Homo sapiens
cagaaagcggagagtcacagcggggccaggccctggggagcggagcctccaccgcccccctcattcccaggcaagggcttggggggaatgagccgggagagccgggtcccgagcctacagagccgggagcagctgagccgccggcgcctcggccgccgccgccgcctcctcctcctccgccgccgccagcccggagcctgagccggcggggcgggggggagaggagcgagcgcagcgcagcagcggagccccgcgaggcccgcccgggcgggtggggagggcagcccgggggactgggccccggggcggggtgggagggggggagaagacgaagacagggccgggtctctccgcggacgagacagcggggatcatggccgcgcaggtcgcccccgccgccgccagcagcctgggcaacccgccgccgccgccgccctcggagctgaagaaagccgagcagcagcagcgggaggaggcggggggcgaggcggcggcggcggcagcggccgagcgcggggaaatgaaggcagccgccgggcaggaaagcgagggccccgccgtggggccgccgcagccgctgggaaaggagctgcaggacggggccgagagcaatgggggtggcggcggcggcggagccggcagcggcggcgggcccggcgcggagccggacctgaagaactcgaacgggaacgcgggccctaggcccgccctgaacaataacctcacggagccgcccggcggcggcggtggcggcagcagcgatggggtgggggcgcctcctcactcagccgcggccgccttgccgcccccagcctacggcttcgggcaaccctacggccggagcccgtctgccgtcgccgccgccgcggccgccgtcttccaccaacaacatggcggacaacaaagccctggcctggcagcgctgcagagcggcggcggcgggggcctggagccctacgcggggccccagcagaactctcacgaccacggcttccccaaccaccagtacaactcctactaccccaaccgcagcgcctaccccccgcccgccccggcctacgcgctgagctccccgagaggtggcactccgggctccggcgcggcggcggctgccggctccaagccgcctccctcctccagcgcctccgcctcctcgtcgtcttcgtccttcgctcagcagcgcttcggggccatggggggaggcggcccctccgcggccggcgggggaactccccagcccaccgccacccccaccctcaaccaactgctcacgtcgcccagctcggcccggggctaccagggctaccccgggggcgactacagtggcgggccccaggacgggggcgccggcaagggcccggcggacatggcctcgcagtgttggggggctgcggcggcggcagctgcggcggcggccgcctcgggaggggcccaacaaaggagccaccacgcgcccatgagccccgggagcagcggcggcggggggcagccgctcgcccggacccctcagccatccagtccaatggatcagatgggcaagatgagacctcagccatatggcgggactaaaccatactcgcagcaacagggacctccgtcaggaccgcagcaaggacatgggtacccagggcagccatacgggtcccagaccccgcagcggtacccgatgaccatgcagggccgggcgcagagtgccatgggcggcctctcttatacacagcagattcctccttatggacaacaaggccccagcgggtatggtcaacagggccagactccatattacaaccagcaaagtcctcaccctcagcagcagcagccaccctactcccagcaaccaccgtcccagacccctcatgcccaaccttcgtatcagcagcagccacagtctcaaccaccacagctccagtcctctcagcctccatactcccagcagccatcccagcctccacatcagcagtccccggctccatacccctcccagcagtcgacgacacagcagcacccccagagccagcccccctactcacagccacaggctcagtctccttaccagcagcagcaacctcagcagccagcaccctcgacgctctcccagcaggctgcgtatcctcagccccagtctcagcagtcccagcaaactgcctattcccagcagcgcttccctccaccgcaggagctatctcaagattcatttgggtctcaggcatcctcagccccctcaatgacctccagtaagggagggcaagaagatatgaacctgagccttcagtcaagaccctccagcttgcctgatctatctggttcaatagatgacctccccatggggacagaaggagctctgagtcctggagtgagcacatcagggatttccagcagccaaggagagcagagtaatccagctcagtctcctttctctcctcatacctcccctcacctgcctggcatccgaggcccttccccgtcccctgttggctctcccgccagtgttgctcagtctcgctcaggaccactctcgcctgctgcagtgccaggcaaccagatgccacctcggccacccagtggccagtcggacagcatcatgcatccttccatgaaccaatcaagcattgcccaagatcgaggttatatgcagaggaacccccagatgccccagtacagttccccccagcccggctcagccttatctccgcgtcagccttccggaggacagatacacacaggcatgggctcctaccagcagaactccatggggagctatggtccccaggggggtcagtatggcccacaaggtggctaccccaggcagccaaactataatgccttgcccaatgccaactaccccagtgcaggcatggctggaggcataaaccccatgggtgccggaggtcaaatgcatggacagcctggcatcccaccttatggcacactccctccagggaggatgagtcacgcctccatgggcaaccggccttatggccctaacatggccaatatgccacctcaggttgggtcagggatgtgtcccccaccagggggcatgaaccggaaaacccaagaaactgctgtcgccatgcatgttgctgccaactctatccaaaacaggccgccaggctaccccaatatgaatcaagggggcatgatgggaactggacctccttatggacaagggattaatagtatggctggcatgatcaaccctcagggacccccatattccatgggtggaaccatggccaacaattctgcagggatggcagccagcccagagatgatgggccttggggatgtaaagttaactccagccaccaaaatgaacaacaaggcagatgggacacccaagacagaatccaaatccaagaaatccagttcttctactacaaccaatgagaagatcaccaagttgtatgagctgggtggtgagcctgagaggaagatgtgggtggaccgttatctggccttcactgaggagaaggccatgggcatgacaaatctgcctgctgtgggtaggaaacctctggacctctatcgcctctatgtgtctgtgaaggagattggtggattgactcaggtcaacaagaacaaaaaatggcgggaacttgcaaccaacctcaatgtgggcacatcaagcagtgctgccagctccttgaaaaagcagtatatccagtgtctctatgcctttgaatgcaagattgaacggggagaagaccctcccccagacatctttgcagctgctgattccaagaagtcccagcccaagatccagcctccctctcctgcgggatcaggatctatgcaggggccccagactccccagtcaaccagcagttccatggcagaaggaggagacttaaagccaccaactccagcatccacaccacacagtcagatccccccattgccaggcatgagcaggagcaattcagttgggatccaggatgcctttaatgatggaagtgactccacattccagaagcggaattccatgactccaaaccctgggtatcagcccagtatgaatacctctgacatgatggggcgcatgtcctatgagccaaataaggatccttatggcagcatgaggaaagctccagggagtgatcccttcatgtcctcagggcagggccccaacggcgggatgggtgacccctacagtcgtgctgccggccctgggctaggaaatgtggcgatgggaccacgacagcactatccctatggaggtccttatgacagagtgaggacggagcctggaatagggcctgagggaaacatgagcactggggccccacagccgaatctcatgccttccaacccagactcggggatgtattctcctagccgctaccccccgcagcagcagcagcagcagcagcaacgacatgattcctatggcaatcagttctccacccaaggcaccccttctggcagccccttccccagccagcagactacaatgtatcaacagcaacagcagaattacaagcggccaatggatggcacatatggccctcctgccaagcggcacgaaggggagatgtacagcgtgccatacagcactgggcaggggcagcctcagcagcagcagttgcccccagcccagccccagcctgccagccagcaacaagctgcccagccttcccctcagcaagatgtatacaaccagtatggcaatgcctatcctgccactgccacagctgctactgagcgccgaccagcaggcggcccccagaaccaatttccattccagtttggccgagaccgtgtctctgcaccccctggcaccaatgcccagcaaaacatgccaccacaaatgatgggcggccccatacaggcatcagctgaggttgctcagcaaggcaccatgtggcaggggcgtaatgacatgacctataattatgccaacaggcagagcacgggctctgccccccagggccccgcctatcatggcgtgaaccgaacagatgaaatgctgcacacagatcagagggccaaccacgaaggctcgtggccttcccatggcacacgccagcccccatatggtccctctgcccctgtgccccccatgacaaggccccctccatctaactaccagcccccaccaagcatgcagaatcacattcctcaggtatccagccctgctcccctgccccggccaatggagaaccgcacctctcctagcaagtctccattcctgcactctgggatgaaaatgcagaaggcaggtcccccagtacctgcctcgcacatagcacctgcccctgtgcagccccccatgattcggcgggatatcaccttcccacctggctctgttgaagccacacagcctgtgttgaagcagaggaggcggctcacaatgaaagacattggaaccccggaggcatggcgggtaatgatgtccctcaagtctggtctcctggcagagagcacatgggcattagataccatcaacatcctgctgtatgatgacaacagcatcatgaccttcaacctcagtcagctcccagggttgctagagctccttgtagaatatttccgacgatgcctgattgagatctttggcattttaaaggagtatgaggtgggtgacccaggacagagaacgctactggatcctgggaggttcagcaaggtgtctagtccagctcccatggagggtggggaagaagaagaagaacttctaggtcctaaactagaagaggaagaagaagaggaagtagttgaaaatgatgaggagatagccttttcaggcaaggacaagccagcttcagagaatagtgaggagaagctgatcagtaagtttgacaagcttccagtaaagatcgtacagaagaatgatccatttgtggtggactgctcagataagcttgggcgtgtgcaggagtttgacagtggcctgctgcactggcggattggtgggggggacaccactgagcatatccagacccacttcgagagcaagacagagctgctgccttcccggcctcacgcaccctgcccaccagcccctcggaagcatgtgacaacagcagagggtacaccagggacaacagaccaggaggggcccccacctgatggacctccagaaaaacggatcacagccactatggatgacatgttgtctactcggtctagcaccttgaccgaggatggagctaagagttcagaggccatcaaggagagcagcaagtttccatttggcattagcccagcacagagccaccggaacatcaagatcctagaggacgaaccccacagtaaggatgagaccccactgtgtacccttctggactggcaggattctcttgccaagcgctgcgtctgtgtgtccaataccattcgaagcctgtcatttgtgccaggcaatgactttgagatgtccaaacacccagggctgctgctcatcctgggcaagctgatcctgctgcaccacaagcacccagaacggaagcaggcaccactaacttatgaaaaggaggaggaacaggaccaaggggtgagctgcaacaaagtggagtggtggtgggactgcttggagatgctccgggaaaacaccttggttacactcgccaacatctcggggcagttggacctatctccataccccgagagcatttgcctgcctgtcctggacggactcctacactgggcagtttgcccttcagctgaagcccaggaccccttttccaccctgggccccaatgccgtcctttccccgcagagactggtcttggaaaccctcagcaaactcagcatccaggacaacaatgtggacctgattctggccacaccccccttcagccgcctggagaagttgtatagcactatggtgcgcttcctcagtgaccgaaagaacccggtgtgccgggagatggctgtggtactgctggccaacctggctcagggggacagcctggcagctcgtgccattgcagtgcagaagggcagtatcggcaacctcctgggcttcctagaggacagccttgccgccacacagttccagcagagccaggccagcctcctccacatgcagaacccaccctttgagccaactagtgtggacatgatgcggcgggctgcccgcgcgctgcttgccttggccaaggtggacgagaaccactcagagtttactctgtacgaatcacggctgttggacatctcggtatcaccgttgatgaactcattggtttcacaagtcatttgtgatgtactgtttttgattggccagtcatgacagccgtgggacacctcccccccccgtgtgtgtgtgcgtgtgtggagaacttagaaactgactgttgccctttatttatgcaaaaccacctcagaatccagtttaccctgtgctgtccagcttctcccttgggaaaaagtctctcctgtttctctctcctccttccacctcccctccctccatcacctcacgcctttctgttccttgtcctcaccttactcccctcaggaccctaccccaccctctttgaaaagacaaagctctgcctacatagaagactttttttattttaaccaaagttactgttgtttacagtgagtttggggaaaaaaaataaaataaaaatggctttcccagtccttgcatcaacgggatgccacatttcataactgtttttaatggtaaaaaaaaaaaaaaaaaatacaaaaaaaaattctgaaggacaaaaaaggtgactgctgaactgtgtgtggtttattgttgtacattcacaatcttgcaggagccaagaagttcgcagttgtgaacagaccctgttcactggagaggcctgtgcagtagagtgtagaccctttcatgtactgtactgtacacctgatactgtaaacatactgtaataataatgtctcacatggaaacagaaaacgctgggtcagcagcaagctgtagtttttaaaaatgtttttagttaaacgttgaggagaaaaaaaaaaaaggcttttcccccaaagtatcatgtgtgaacctacaacaccctgacctctttctctcctccttgattgtatgaataaccctgagatcacctcttagaactggttttaacctttagctgcagcggctacgctgccacgtgtgtatatatatgacgttgtacattgcacatacccttggatccccacagtttggtcctcctcccagctacccctttatagtatgacgagttaacaagttggtgacctgcacaaagcgagacacagctatttaatctcttgccagatatcgcccctcttggtgcgatgctgtacaggtctctgtaaaaagtccttgctgtctcagcagccaatcaacttatagtttatttttttctgggtttttgttttgttttgttttctttctaatcgaggtgtgaaaaagttctaggttcagttgaagttctgatgaagaaacacaattgagattttttcagtgataaaatctgcatatttgtatttcaacaatgtagctaaaacttgatgtaaattcctcctttttttccttttttggcttaatgaatatcatttattcagtatgaaatctttatactatatgttccacgtgttaagaataaatgtacattaaatcttggtaagacttt

SEQ ID NO: 78 - DNA, 8584 bp, Homo sapiens
cagaaagcggagagtcacagcggggccaggccctggggagcggagcctccaccgcccccctcattcccaggcaagggcttggggggaatgagccgggagagccgggtcccgagcctacagagccgggagcagctgagccgccggcgcctcggccgccgccgccgcctcctcctcctccgccgccgccagcccggagcctgagccggcggggcgggggggagaggagcgagcgcagcgcagcagcggagccccgcgaggcccgcccgggcgggtggggagggcagcccgggggactgggccccggggcggggtgggagggggggagaagacgaagacagggccgggtctctccgcggacgagacagcggggatcatggccgcgcaggtcgcccccgccgccgccagcagcctgggcaacccgccgccgccgccgccctcggagctgaagaaagccgagcagcagcagcgggaggaggcggggggcgaggcggcggcggcggcagcggccgagcgcggggaaatgaaggcagccgccgggcaggaaagcgagggccccgccgtggggccgccgcagccgctgggaaaggagctgcaggacggggccgagagcaatgggggtggcggcggcggcggagccggcagcggcggcgggcccggcgcggagccggacctgaagaactcgaacgggaacgcgggccctaggcccgccctgaacaataacctcacggagccgcccggcggcggcggtggcggcagcagcgatggggtgggggcgcctcctcactcagccgcggccgccttgccgcccccagcctacggcttcgggcaaccctacggccggagcccgtctgccgtcgccgccgccgcggccgccgtcttccaccaacaacatggcggacaacaaagccctggcctggcagcgctgcagagcggcggcggcgggggcctggagccctacgcggggccccagcagaactctcacgaccacggcttccccaaccaccagtacaactcctactaccccaaccgcagcgcctaccccccgcccgccccggcctacgcgctgagctccccgagaggtggcactccgggctccggcgcggcggcggctgccggctccaagccgcctccctcctccagcgcctccgcctcctcgtcgtcttcgtccttcgctcagcagcgcttcggggccatggggggaggcggcccctccgcggccggcgggggaactccccagcccaccgccacccccaccctcaaccaactgctcacgtcgcccagctcggcccggggctaccagggctaccccgggggcgactacagtggcgggccccaggacgggggcgccggcaagggcccggcggacatggcctcgcagtgttggggggctgcggcggcggcagctgcggcggcggccgcctcgggaggggcccaacaaaggagccaccacgcgcccatgagccccgggagcagcggcggcggggggcagccgctcgcccggacccctcagccatccagtccaatggatcagatgggcaagatgagacctcagccatatggcgggactaaccctactcgcagcaacagggacctccgtcaggaccgcagcaaggacatgggtacccagggcagccatacgggtcccagaccccgcagcggtacccgatgaccatgcagggccgggcgcagagtgccatgggcggcctctcttatacacagcagattcctccttatggacaacaaggccccagcgggtatggtcaacagggccagactccatattacaaccagcaaagtcctcaccctcagcagcagcagccaccctactcccagcaaccaccgtcccagacccctcatgcccaaccttcgtatcagcagcagccacagtctcaaccaccacagctccagtcctctcagcctccatactcccagcagccatcccagcctccacatcagcagtccccggctccatacccctcccagcagtcgacgacacagcagcacccccagagccagcccccctactcacagccacaggctcagtctccttaccagcagcagcaacctcagcagccagcaccctcgacgctctcccagcaggctgcgtatcctcagccccagtctcagcagtcccagcaaactgcctattcccagcagcgcttccctccaccgcaggagctatctcaagattcatttgggtctcaggcatcctcagccccctcaatgacctccagtaagggagggcaagaagatatgaacctgagccttcagtcaagaccctccagcttgcctgatctatctggttcaatagatgacctccccatggggacagaaggagctctgagtcctggagtgagcacatcagggatttccagcagccaaggagagcagagtaatccagctcagtctcctttctctcctcatacctcccctcacctgcctggcatccgaggcccttccccgtcccctgttggctctcccgccagtgttgctcagtctcgctcaggaccactctcgcctgctgcagtgccaggcaaccagatgccacctcggccacccagtggccagtcggacagcatcatgcatccttccatgaaccaatcaagcattgcccaagatcgaggttatatgcagaggaacccccagatgccccagtacagttccccccagcccggctcagccttatctccgcgtcagccttccggaggacagatacacacaggcatgggctcctaccagcagaactccatggggagctatggtccccaggggggtcagtatggcccacaaggtggctaccccaggcagccaaactataatgccttgcccaatgccaactaccccagtgcaggcatggctggaggcataaaccccatgggtgccggaggtcaaatgcatggacagcctggcatcccaccttatggcacactccctccagggaggatgagtcacgcctccatgggcaaccggccttatggccctaacatggccaatatgccacctcaggttgggtcagggatgtgtcccccaccagggggcatgaaccggaaaacccaagaaactgctgtcgccatgcatgttgctgccaactctatccaaaacaggccgccaggctaccccaatatgaatcaagggggcatgatgggaactggacctccttatggacaagggattaatagtatggctggcatgatcaaccctcagggacccccatattccatgggtggaaccatggccaacaattctgcagggatggcagccagcccagagatgatgggccttggggatgtaaagttaactccagccaccaaaatgaacaacaaggcagatgggacacccaagacagaatccaaatccaagaaatccagttcttctactacaaccaatgagaagatcaccaagttgtatgagctgggtggtgagcctgagaggaagatgtgggtggaccgttatctggccttcactgaggagaaggccatgggcatgacaaatctgcctgctgtgggtaggaaacctctggacctctatcgcctctatgtgtctgtgaaggagattggtggattgactcaggtcaacaagaacaaaaaatggcgggaacttgcaaccaacctcaatgtgggcacatcaagcagtgctgccagctccttgaaaaagcagtatatccagtgtctctatgcctttgaatgcaagattgaacggggagaagaccctcccccagacatctttgcagctgctgattccaagaagtcccagcccaagatccagcctccctctcctgcgggatcaggatctatgcaggggccccagactccccagtcaaccagcagttccatggcagaaggaggagacttaaagccaccaactccagcatccacaccacacagtcagatccccccattgccaggcatgagcaggagcaattcagttgggatccaggatgcctttaatgatggaagtgactccacattccagaagcggaattccatgactccaaaccctgggtatcagcccagtatgaatacctctgacatgatggggcgcatgtcctatgagccaaataaggatccttatggcagcatgaggaaagctccagggagtgatcccttcatgtcctcagggcagggccccaacggcgggatgggtgacccctacagtcgtgctgccggccctgggctaggaaatgtggcgatgggaccacgacagcactatccctatggaggtccttatgacagagtgaggacggagcctggaatagggcctgagggaaacatgagcactggggccccacagccgaatctcatgccttccaacccagactcggggatgtattctcctagccgctaccccccgcagcagcagcagcagcagcagcaacgacatgattcctatggcaatcagttctccacccaaggcaccccttctggcagccccttccccagccagcagactacaatgtatcaacagcaacagcagaattacaagcggccaatggatggcacatatggccctcctgccaagcggcacgaaggggagatgtacagcgtgccatacagcactgggcaggggcagcctcagcagcagcagttgcccccagcccagccccagcctgccagccagcaacaagctgcccagccttcccctcagcaagatgtatacaaccagtatggcaatgcctatcctgccactgccacagctgctactgagcgccgaccagcaggcggcccccagaaccaatttccattccagtttggccgagaccgtgtctctgcaccccctggcaccaatgcccagcaaaacatgccaccacaaatgatgggcggccccatacaggcatcagctgaggttgctcagcaaggcaccatgtggcaggggcgtaatgacatgacctataattatgccaacaggcagagcacgggctctgccccccagggccccgcctatcatggcgtgaaccgaacagatgaaatgctgcacacagatcagagggccaaccacgaaggctcgtggccttcccatggcacacgccagcccccatatggtccctctgcccctgtgccccccatgacaaggccccctccatctaactaccagcccccaccaagcatgcagaatcacattcctcaggtatccagccctgctcccctgccccggccaatggagaaccgcacctctcctagcaagtctccattcctgcactctgggatgaaaatgcagaaggcaggtcccccagtacctgcctcgcacatagcacctgcccctgtgcagccccccatgattcggcgggatatcaccttcccacctggctctgttgaagccacacagcctgtgttgaagcagaggaggcggctcacaatgaaagacattggaaccccggaggcatggcgggtaatgatgtccctcaagtctggtctcctggcagagagcacatgggcattagataccatcaacatcctgctgtatgatgacaacagcatcatgaccttcaacctcagtcagctcccagggttgctagagctccttgtagaatatttccgacgatgcctgattgagatctttggcattttaaaggagtatgaggtgggtgacccaggacagagaacgctactggatcctgggaggttcagcaaggtgtctagtccagctcccatggagggtggggaagaagaagaagaacttctaggtcctaaactagaagaggaagaagaagaggaagtagttgaaaatgatgaggagatagccttttcaggcaaggacaagccagcttcagagaatagtgaggagaagctgatcagtaagtttgacaagcttccagtaaagatcgtacagaagaatgatccatttgtggtggactgctcagataagcttgggcgtgtgcaggagtttgacagtggcctgctgcactggcggattggtgggggggacaccactgagcatatccagacccacttcgagagcaagacagagctgctgccttcccggcctcacgcaccctgcccaccagcccctcggaagcatgtgacaacagcagagggtacaccagggacaacagaccaggaggggcccccacctgatggacctccagaaaaacggatcacagccactatggatgacatgttgtctactcggtctagcaccttgaccgaggatggagctaagagttcagaggccatcaaggagagcagcaagtttccatttggcattagcccagcacagagccaccggaacatcaagatcctagaggacgaaccccacagtaaggatgagaccccactgtgtacccttctggactggcaggattctcttgccaagcgctgcgtctgtgtgtccaataccattcgaagcctgtcatttgtgccaggcaatgactttgagatgtccaaacacccagggctgctgctcatcctgggcaagctgatcctgctgcaccacaagcacccagaacggaagcaggcaccactaacttatgaaaaggaggaggaacaggaccaaggggtgagctgcaacaaagtggagtggtggtgggactgcttggagatgctccgggaaaacaccttggttacactcgccaacatctcggggcagttggacctatctccataccccgagagcatttgcctgcctgtcctggacggactcctacactgggcagtttgcccttcagctgaagcccaggaccccttttccaccctgggccccaatgccgtcctttccccgcagagactggtcttggaaaccctcagcaaactcagcatccaggacaacaatgtggacctgattctggccacaccccccttcagccgcctggagaagttgtatagcactatggtgcgcttcctcagtgaccgaaagaacccggtgtgccgggagatggctgtggtactgctggccaacctggctcagggggacagcctggcagctcgtgccattgcagtgcagaagggcagtatcggcaacctcctgggcttcctagaggacagccttgccgccacacagttccagcagagccaggccagcctcctccacatgcagaacccaccctttgagccaactagtgtggacatgatgcggcgggctgcccgcgcgctgcttgccttggccaaggtggacgagaaccactcagagtttactctgtacgaatcacggctgttggacatctcggtatcaccgttgatgaactcattggtttcacaagtcatttgtgatgtactgtttttgattggccagtcatgacagccgtgggacacctcccccccccgtgtgtgtgtgcgtgtgtggagaacttagaaactgactgttgccctttatttatgcaaaaccacctcagaatccagtttaccctgtgctgtccagcttctcccttgggaaaaagtctctcctgtttctctctcctccttccacctcccctccctccatcacctcacgcctttctgttccttgtcctcaccttactcccctcaggaccctaccccaccctctttgaaaagacaaagctctgcctacatagaagactttttttattttaaccaaagttactgttgtttacagtgagtttggggaaaaaaaataaaataaaaatggctttcccagtccttgcatcaacgggatgccacatttcataactgtttttaatggtaaaaaaaaaaaaaaaaaatacaaaaaaaaattctgaaggacaaaaaaggtgactgctgaactgtgtgtggtttattgttgtacattcacaatcttgcaggagccaagaagttcgcagttgtgaacagaccctgttcactggagaggcctgtgcagtagagtgtagaccctttcatgtactgtactgtacacctgatactgtaaacatactgtaataataatgtctcacatggaaacagaaaacgctgggtcagcagcaagctgtagtttttaaaaatgtttttagttaaacgttgaggagaaaaaaaaaaaaggcttttcccccaaagtatcatgtgtgaacctacaacaccctgacctctttctctcctccttgattgtatgaataaccctgagatcacctcttagaactggttttaacctttagctgcagcggctacgctgccacgtgtgtatatatatgacgttgtacattgcacatacccttggatccccacagtttggtcctcctcccagctacccctttatagtatgacgagttaacaagttggtgacctgcacaaagcgagacacagctatttaatctcttgccagatatcgcccctcttggtgcgatgctgtacaggtctctgtaaaaagtccttgctgtctcagcagccaatcaacttatagtttatttttttctgggtttttgttttgttttgttttctttctaatcgaggtgtgaaaaagttctaggttcagttgaagttctgatgaagaaacacaattgagattttttcagtgataaaatctgcatatttgtatttcaacaatgtagctaaaacttgatgtaaattcctcctttttttccttttttggcttaatgaatatcatttattcagtatgaaatctttatactatatgttccacgtgttaagaataaatgtacattaaatcttggtaagacttt

SEQ ID NO: 79 - DNA, 8585 bp, Homo sapiens
cagaaagcggagagtcacagcggggccaggccctggggagcggagcctccaccgcccccctcattcccaggcaagggcttggggggaatgagccgggagagccgggtcccgagcctacagagccgggagcagctgagccgccggcgcctcggccgccgccgccgcctcctcctcctccgccgccgccagcccggagcctgagccggcggggcgggggggagaggagcgagcgcagcgcagcagcggagccccgcgaggcccgcccgggcgggtggggagggcagcccgggggactgggccccggggcggggtgggagggggggagaagacgaagacagggccgggtctctccgcggacgagacagcggggatcatggccgcgcaggtcgcccccgccgccgccagcagcctgggcaacccgccgccgccgccgccctcggagctgaagaaagccgagcagcagcagcgggaggaggcggggggcgaggcggcggcggcggcagcggccgagcgcggggaaatgaaggcagccgccgggcaggaaagcgagggccccgccgtggggccgccgcagccgctgggaaaggagctgcaggacggggccgagagcaatgggggtggcggcggcggcggagccggcagcggcggcgggcccggcgcggagccggacctgaagaactcgaacgggaacgcgggccctaggcccgccctgaacaataacctcacggagccgcccggcggcggcggtggcggcagcagcgatggggtgggggcgcctcctcactcagccgcggccgccttgccgcccccagcctacggcttcgggcaaccctacggccggagcccgtctgccgtcgccgccgccgcggccgccgtcttccaccaacaacatggcggacaacaaagccctggcctggcagcgctgcagagcggcggcggcgggggcctggagccctacgcggggccccagcagaactctcacgaccacggcttccccaaccaccagtacaactcctactaccccaaccgcagcgcctaccccccgcccgccccggcctacgcgctgagctccccgagaggtggcactccgggctccggcgcggcggcggctgccggctccaagccgcctccctcctccagcgcctccgcctcctcgtcgtcttcgtccttcgctcagcagcgcttcggggccatggggggaggcggcccctccgcggccggcgggggaactccccagcccaccgccacccccaccctcaaccaactgctcacgtcgcccagctcggcccggggctaccagggctaccccgggggcgactacagtggcgggccccaggacgggggcgccggcaagggcccggcggacatggcctcgcagtgttggggggctgcggcggcggcagctgcggcggcggccgcctcgggaggggcccaacaaaggagccaccacgcgcccatgagccccgggagcagcggcggcggggggcagccgctcgcccggacccctcagccatccagtccaatggatcagatgggcaagatgagacctcagccatatggcgggactaacccatactcgcagcaacagggacctccgtcaggaccgcagcaaggacatgggtacccagggcagccatacgggtcccagaccccgcagcggtacccgatgaccatgcagggccgggcgcagagtgccatgggcggcctctcttatacacagcagattcctccttatggacaacaaggccccagcgggtatggtcaacagggccagactccatattacaaccagcaaagtcctcaccctcagcagcagcagccaccctactcccagcaaccaccgtcccagacccctcatgcccaaccttcgtatcagcagcagccacagtctcaaccaccacagctccagtcctctcagcctccatactcccagcagccatcccagcctccacatcagcagtccccggctccatacccctcccagcagtcgacgacacagcagcacccccagagccagcccccctactcacagccacaggctcagtctccttaccagcagcagcaacctcagcagccagcaccctcgacgctctcccagcaggctgcgtatcctcagccccagtctcagcagtcccagcaaactgcctattcccagcagcgcttccctccaccgcaggagctatctcaagattcatttgggtctcaggcatcctcagccccctcaatgacctccagtaagggagggcaagaagatatgaacctgagccttcagtcaagaccctccagcttgcctgatctatctggttcaatagatgacctccccatggggacagaaggagctctgagtcctggagtgagcacatcagggatttccagcagccaaggagagcagagtaatccagctcagtctcctttctctcctcatacctcccctcacctgcctggcatccgaggcccttccccgtcccctgttggctctcccgccagtgttgctcagtctcgctcaggaccactctcgcctgctgcagtgccaggcaaccagatgccacctcggccacccagtggccagtcggacagcatcatgcatccttccatgaaccaatcaagcattgcccaagatcgaggttatatgcagaggaacccccagatgccccagtacagttccccccagcccggctcagccttatctccgcgtcagccttccggaggacagatacacacaggcatgggctcctaccagcagaactccatggggagctatggtccccaggggggtcagtatggcccacaaggtggctaccccaggcagccaaactataatgccttgcccaatgccaactaccccagtgcaggcatggctggaggcataaaccccatgggtgccggaggtcaaatgcatggacagcctggcatcccaccttatggcacactccctccagggaggatgagtcacgcctccatgggcaaccggccttatggccctaacatggccaatatgccacctcaggttgggtcagggatgtgtcccccaccagggggcatgaaccggaaaacccaagaaactgctgtcgccatgcatgttgctgccaactctatccaaaacaggccgccaggctaccccaatatgaatcaagggggcatgatgggaactggacctccttatggacaagggattaatagtatggctggcatgatcaaccctcagggacccccatattccatgggtggaaccatggccaacaattctgcagggatggcagccagcccagagatgatgggccttggggatgtaaagttaactccagccaccaaaatgaacaacaaggcagatgggacacccaagacagaatccaaatccaagaaatccagttcttctactacaaccaatgagaagatcaccaagttgtatgagctgggtggtgagcctgagaggaagatgtgggtggaccgttatctggccttcactgaggagaaggccatgggcatgacaaatctgcctgctgtgggtaggaaacctctggacctctatcgcctctatgtgtctgtgaaggagattggtggattgactcaggtcaacaagaacaaaaaatggcgggaacttgcaaccaacctcaatgtgggcacatcaagcagtgctgccagctccttgaaaaagcagtatatccagtgtctctatgcctttgaatgcaagattgaacggggagaagaccctcccccagacatctttgcagctgctgattccaagaagtcccagcccaagatccagcctccctctcctgcgggatcaggatctatgcaggggccccagactccccagtcaaccagcagttccatggcagaaggaggagacttaaagccaccaactccagcatccacaccacacagtcagatccccccattgccaggcatgagcaggagcaattcagttgggatccaggatgcctttaatgatggaagtgactccacattccagaagcggaattccatgactccaaaccctgggtatcagcccagtatgaatacctctgacatgatggggcgcatgtcctatgagccaaataaggatccttatggcagcatgaggaaagctccagggagtgatcccttcatgtcctcagggcagggccccaacggcgggatgggtgacccctacagtcgtgctgccggccctgggctaggaaatgtggcgatgggaccacgacagcactatccctatggaggtccttatgacagagtgaggacggagcctggaatagggcctgagggaaacatgagcactggggccccacagccgaatctcatgccttccaacccagactcggggatgtattctcctagccgctaccccccgcagcagcagcagcagcagcagcaacgacatgattcctatggcaatcagttctccacccaaggcaccccttctggcagccccttccccagccagcagactacaatgtatcaacagcaacagcagaattacaagcggccaatggatggcacatatggccctcctgccaagcggcacgaaggggagatgtacagcgtgccatacagcactgggcaggggcagcctcagcagcagcagttgcccccagcccagccccagcctgccagccagcaacaagctgcccagccttcccctcagcaagatgtatacaaccagtatggcaatgcctatcctgccactgccacagctgctactgagcgccgaccagcaggcggcccccagaaccaatttccattccagtttggccgagaccgtgtctctgcaccccctggcaccaatgcccagcaaaacatgccaccacaaatgatgggcggccccatacaggcatcagctgaggttgctcagcaaggcaccatgtggcaggggcgtaatgacatgacctataattatgccaacaggcagagcacgggctctgccccccagggccccgcctatcatggcgtgaaccgaacagatgaaatgctgcacacagatcagagggccaaccacgaaggctcgtggccttcccatggcacacgccagcccccatatggtccctctgcccctgtgccccccatgacaaggccccctccatctaactaccagcccccaccaagcatgcagaatcacattcctcaggtatccagccctgctcccctgccccggccaatggagaaccgcacctctcctagcaagtctccattcctgcactctgggatgaaaatgcagaaggcaggtcccccagtacctgcctcgcacatagcacctgcccctgtgcagccccccatgattcggcgggatatcaccttcccacctggctctgttgaagccacacagcctgtgttgaagcagaggaggcggctcacaatgaaagacattggaaccccggaggcatggcgggtaatgatgtccctcaagtctggtctcctggcagagagcacatgggcattagataccatcaacatcctgctgtatgatgacaacagcatcatgaccttcaacctcagtcagctcccagggttgctagagctccttgtagaatatttccgacgatgcctgattgagatctttggcattttaaaggagtatgaggtgggtgacccaggacagagaacgctactggatcctgggaggttcagcaaggtgtctagtccagctcccatggagggtggggaagaagaagaagaacttctaggtcctaaactagaagaggaagaagaagaggaagtagttgaaaatgatgaggagatagccttttcagacaaggacaagccagcttcagagaatagtgaggagaagctgatcagtaagtttgacaagcttccagtaaagatcgtacagaagaatgatccatttgtggtggactgctcagataagcttgggcgtgtgcaggagtttgacagtggcctgctgcactggcggattggtgggggggacaccactgagcatatccagacccacttcgagagcaagacagagctgctgccttcccggcctcacgcaccctgcccaccagcccctcggaagcatgtgacaacagcagagggtacaccagggacaacagaccaggaggggcccccacctgatggacctccagaaaaacggatcacagccactatggatgacatgttgtctactcggtctagcaccttgaccgaggatggagctaagagttcagaggccatcaaggagagcagcaagtttccatttggcattagcccagcacagagccaccggaacatcaagatcctagaggacgaaccccacagtaaggatgagaccccactgtgtacccttctggactggcaggattctcttgccaagcgctgcgtctgtgtgtccaataccattcgaagcctgtcatttgtgccaggcaatgactttgagatgtccaaacacccagggctgctgctcatcctgggcaagctgatcctgctgcaccacaagcacccagaacggaagcaggcaccactaacttatgaaaaggaggaggaacaggaccaaggggtgagctgcaacaaagtggagtggtggtgggactgcttggagatgctccgggaaaacaccttggttacactcgccaacatctcggggcagttggacctatctccataccccgagagcatttgcctgcctgtcctggacggactcctacactgggcagtttgcccttcagctgaagcccaggaccccttttccaccctgggccccaatgccgtcctttccccgcagagactggtcttggaaaccctcagcaaactcagcatccaggacaacaatgtggacctgattctggccacaccccccttcagccgcctggagaagttgtatagcactatggtgcgcttcctcagtgaccgaaagaacccggtgtgccgggagatggctgtggtactgctggccaacctggctcagggggacagcctggcagctcgtgccattgcagtgcagaagggcagtatcggcaacctcctgggcttcctagaggacagccttgccgccacacagttccagcagagccaggccagcctcctccacatgcagaacccaccctttgagccaactagtgtggacatgatgcggcgggctgcccgcgcgctgcttgccttggccaaggtggacgagaaccactcagagtttactctgtacgaatcacggctgttggacatctcggtatcaccgttgatgaactcattggtttcacaagtcatttgtgatgtactgtttttgattggccagtcatgacagccgtgggacacctcccccccccgtgtgtgtgtgcgtgtgtggagaacttagaaactgactgttgccctttatttatgcaaaaccacctcagaatccagtttaccctgtgctgtccagcttctcccttgggaaaaagtctctcctgtttctctctcctccttccacctcccctccctccatcacctcacgcctttctgttccttgtcctcaccttactcccctcaggaccctaccccaccctctttgaaaagacaaagctctgcctacatagaagactttttttattttaaccaaagttactgttgtttacagtgagtttggggaaaaaaaataaaataaaaatggctttcccagtccttgcatcaacgggatgccacatttcataactgtttttaatggtaaaaaaaaaaaaaaaaaatacaaaaaaaaattctgaaggacaaaaaaggtgactgctgaactgtgtgtggtttattgttgtacattcacaatcttgcaggagccaagaagttcgcagttgtgaacagaccctgttcactggagaggcctgtgcagtagagtgtagaccctttcatgtactgtactgtacacctgatactgtaaacatactgtaataataatgtctcacatggaaacagaaaacgctgggtcagcagcaagctgtagtttttaaaaatgtttttagttaaacgttgaggagaaaaaaaaaaaaggcttttcccccaaagtatcatgtgtgaacctacaacaccctgacctctttctctcctccttgattgtatgaataaccctgagatcacctcttagaactggttttaacctttagctgcagcggctacgctgccacgtgtgtatatatatgacgttgtacattgcacatacccttggatccccacagtttggtcctcctcccagctacccctttatagtatgacgagttaacaagttggtgacctgcacaaagcgagacacagctatttaatctcttgccagatatcgcccctcttggtgcgatgctgtacaggtctctgtaaaaagtccttgctgtctcagcagccaatcaacttatagtttatttttttctgggtttttgttttgttttgttttctttctaatcgaggtgtgaaaaagttctaggttcagttgaagttctgatgaagaaacacaattgagattttttcagtgataaaatctgcatatttgtatttcaacaatgtagctaaaacttgatgtaaattcctcctttttttccttttttggcttaatgaatatcatttattcagtatgaaatctttatactatatgttccacgtgttaagaataaatgtacattaaatcttggtaagacttt

SEQ ID NO: 80 - DNA, 8568 bp, Homo sapiens
cagaaagcggagagtcacagcggggccaggccctggggagcggagcctccaccgcccccctcattcccaggcaagggcttggggggaatgagccgggagagccgggtcccgagcctacagagccgggagcagctgagccgccggcgcctcggccgccgccgccgcctcctcctcctccgccgccgccagcccggagcctgagccggcggggcgggggggagaggagcgagcgcagcgcagcagcggagccccgcgaggcccgcccgggcgggtggggagggcagcccgggggactgggccccggggcggggtgggagggggggagaagacgaagacagggccgggtctctccgcggacgagacagcggggatcatggccgcgcaggtcgcccccgccgccgccagcagcctgggcaacccgccgccgccgccgccctcggagctgaagaaagccgagcagcagcagcgggaggaggcggggggcgaggcggcggcggcggcagcggccgagcgcggggaaatgaaggcagccgccgggcaggaaagcgagggccccgccgtggggccgccgcagccgctgggaaaggagctgcaggacggggccgagagcaatgggggtggcggcggcggcggagccggcagcggcggcgggcccggcgcggagccggacctgaagaactcgaacgggaacgcgggccctaggcccgccctgaacaataacctcacggagccgcccggcggcggcggtggcggcagcagcgatggggtgggggcgcctcctcactcagccgcggccgccttgccgcccccagcctacggcttcgggcaaccctacggccggagccgccgcggccgccgtcttccaccaacaacatggcggacaacaaagccctggcctggcagcgctgcagagcggcggcggcgggggcctggagccctacgcggggccccagcagaactctcacgaccacggcttccccaaccaccagtacaactcctactaccccaaccgcagcgcctaccccccgcccgccccggcctacgcgctgagctccccgagaggtggcactccgggctccggcgcggcggcggctgccggctccaagccgcctccctcctccagcgcctccgcctcctcgtcgtcttcgtccttcgctcagcagcgcttcggggccatggggggaggcggcccctccgcggccggcgggggaactccccagcccaccgccacccccaccctcaaccaactgctcacgtcgcccagctcggcccggggctaccagggctaccccgggggcgactacagtggcgggccccaggacgggggcgccggcaagggcccggcggacatggcctcgcagtgttggggggctgcggcggcggcagctgcggcggcggccgcctcgggaggggcccaacaaaggagccaccacgcgcccatgagccccgggagcagcggcggcggggggcagccgctcgcccggacccctcagccatccagtccaatggatcagatgggcaagatgagacctcagccatatggcgggactaacccatactcgcagcaacagggacctccgtcaggaccgcagcaaggacatgggtacccagggcagccatacgggtcccagaccccgcagcggtacccgatgaccatgcagggccgggcgcagagtgccatgggcggcctctcttatacacagcagattcctccttatggacaacaaggccccagcgggtatggtcaacagggccagactccatattacaaccagcaaagtcctcaccctcagcagcagcagccaccctactcccagcaaccaccgtcccagacccctcatgcccaaccttcgtatcagcagcagccacagtctcaaccaccacagctccagtcctctcagcctccatactcccagcagccatcccagcctccacatcagcagtccccggctccatacccctcccagcagtcgacgacacagcagcacccccagagccagcccccctactcacagccacaggctcagtctccttaccagcagcagcaacctcagcagccagcaccctcgacgctctcccagcaggctgcgtatcctcagccccagtctcagcagtcccagcaaactgcctattcccagcagcgcttccctccaccgcaggagctatctcaagattcatttgggtctcaggcatcctcagccccctcaatgacctccagtaagggagggcaagaagatatgaacctgagccttcagtcaagaccctccagcttgcctgatctatctggttcaatagatgacctccccatggggacagaaggagctctgagtcctggagtgagcacatcagggatttccagcagccaaggagagcagagtaatccagctcagtctcctttctctcctcatacctcccctcacctgcctggcatccgaggcccttccccgtcccctgttggctctcccgccagtgttgctcagtctcgctcaggaccactctcgcctgctgcagtgccaggcaaccagatgccacctcggccacccagtggccagtcggacagcatcatgcatccttccatgaaccaatcaagcattgcccaagatcgaggttatatgcagaggaacccccagatgccccagtacagttccccccagcccggctcagccttatctccgcgtcagccttccggaggacagatacacacaggcatgggctcctaccagcagaactccatggggagctatggtccccaggggggtcagtatggcccacaaggtggctaccccaggcagccaaactataatgccttgcccaatgccaactaccccagtgcaggcatggctggaggcataaaccccatgggtgccggaggtcaaatgcatggacagcctggcatcccaccttatggcacactccctccagggaggatgagtcacgcctccatgggcaaccggccttatggccctaacatggccaatatgccacctcaggttgggtcagggatgtgtcccccaccagggggcatgaaccggaaaacccaagaaactgctgtcgccatgcatgttgctgccaactctatccaaaacaggccgccaggctaccccaatatgaatcaagggggcatgatgggaactggacctccttatggacaagggattaatagtatggctggcatgatcaaccctcagggacccccatattccatgggtggaaccatggccaacaattctgcagggatggcagccagcccagagatgatgggccttggggatgtaaagttaactccagccaccaaaatgaacaacaaggcagatgggacacccaagacagaatccaaatccaagaaatccagttcttctactacaaccaatgagaagatcaccaagttgtatgagctgggtggtgagcctgagaggaagatgtgggtggaccgttatctggccttcactgaggagaaggccatgggcatgacaaatctgcctgctgtgggtaggaaacctctggacctctatcgcctctatgtgtctgtgaaggagattggtggattgactcaggtcaacaagaacaaaaaatggcgggaacttgcaaccaacctcaatgtgggcacatcaagcagtgctgccagctccttgaaaaagcagtatatccagtgtctctatgcctttgaatgcaagattgaacggggagaagaccctcccccagacatctttgcagctgctgattccaagaagtcccagcccaagatccagcctccctctcctgcgggatcaggatctatgcaggggccccagactccccagtcaaccagcagttccatggcagaaggaggagacttaaagccaccaactccagcatccacaccacacagtcagatccccccattgccaggcatgagcaggagcaattcagttgggatccaggatgcctttaatgatggaagtgactccacattccagaagcggaattccatgactccaaaccctgggtatcagcccagtatgaatacctctgacatgatggggcgcatgtcctatgagccaaataaggatccttatggcagcatgaggaaagctccagggagtgatcccttcatgtcctcagggcagggccccaacggcgggatgggtgacccctacagtcgtgctgccggccctgggctaggaaatgtggcgatgggaccacgacagcactatccctatggaggtccttatgacagagtgaggacggagcctggaatagggcctgagggaaacatgagcactggggccccacagccgaatctcatgccttccaacccagactcggggatgtattctcctagccgctaccccccgcagcagcagcagcagcagcagcaacgacatgattcctatggcaatcagttctccacccaaggcaccccttctggcagccccttccccagccagcagactacaatgtatcaacagcaacagcagaattacaagcggccaatggatggcacatatggccctcctgccaagcggcacgaaggggagatgtacagcgtgccatacagcactgggcaggggcagcctcagcagcagcagttgcccccagcccagccccagcctgccagccagcaacaagctgcccagccttcccctcagcaagatgtatacaaccagtatggcaatgcctatcctgccactgccacagctgctactgagcgccgaccagcaggcggcccccagaaccaatttccattccagtttggccgagaccgtgtctctgcaccccctggcaccaatgcccagcaaaacatgccaccacaaatgatgggcggccccatacaggcatcagctgaggttgctcagcaaggcaccatgtggcaggggcgtaatgacatgacctataattatgccaacaggcagagcacgggctctgccccccagggccccgcctatcatggcgtgaaccgaacagatgaaatgctgcacacagatcagagggccaaccacgaaggctcgtggccttcccatggcacacgccagcccccatatggtccctctgcccctgtgccccccatgacaaggccccctccatctaactaccagcccccaccaagcatgcagaatcacattcctcaggtatccagccctgctcccctgccccggccaatggagaaccgcacctctcctagcaagtctccattcctgcactctgggatgaaaatgcagaaggcaggtcccccagtacctgcctcgcacatagcacctgcccctgtgcagccccccatgattcggcgggatatcaccttcccacctggctctgttgaagccacacagcctgtgttgaagcagaggaggcggctcacaatgaaagacattggaaccccggaggcatggcgggtaatgatgtccctcaagtctggtctcctggcagagagcacatgggcattagataccatcaacatcctgctgtatgatgacaacagcatcatgaccttcaacctcagtcagctcccagggttgctagagctccttgtagaatatttccgacgatgcctgattgagatctttggcattttaaaggagtatgaggtgggtgacccaggacagagaacgctactggatcctgggaggttcagcaaggtgtctagtccagctcccatggagggtggggaagaagaagaagaacttctaggtcctaaactagaagaggaagaagaagaggaagtagttgaaaatgatgaggagatagccttttcaggcaaggacaagccagcttcagagaatagtgaggagaagctgatcagtaagtttgacaagcttccagtaaagatcgtacagaagaatgatccatttgtggtggactgctcagataagcttgggcgtgtgcaggagtttgacagtggcctgctgcactggcggattggtgggggggacaccactgagcatatccagacccacttcgagagcaagacagagctgctgccttcccggcctcacgcaccctgcccaccagcccctcggaagcatgtgacaacagcagagggtacaccagggacaacagaccaggaggggcccccacctgatggacctccagaaaaacggatcacagccactatggatgacatgttgtctactcggtctagcaccttgaccgaggatggagctaagagttcagaggccatcaaggagagcagcaagtttccatttggcattagcccagcacagagccaccggaacatcaagatcctagaggacgaaccccacagtaaggatgagaccccactgtgtacccttctggactggcaggattctcttgccaagcgctgcgtctgtgtgtccaataccattcgaagcctgtcatttgtgccaggcaatgactttgagatgtccaaacacccagggctgctgctcatcctgggcaagctgatcctgctgcaccacaagcacccagaacggaagcaggcaccactaacttatgaaaaggaggaggaacaggaccaaggggtgagctgcaacaaagtggagtggtggtgggactgcttggagatgctccgggaaaacaccttggttacactcgccaacatctcggggcagttggacctatctccataccccgagagcatttgcctgcctgtcctggacggactcctacactgggcagtttgcccttcagctgaagcccaggaccccttttccaccctgggccccaatgccgtcctttccccgcagagactggtcttggaaaccctcagcaaactcagcatccaggacaacaatgtggacctgattctggccacaccccccttcagccgcctggagaagttgtatagcactatggtgcgcttcctcagtgaccgaaagaacccggtgtgccgggagatggctgtggtactgctggccaacctggctcagggggacagcctggcagctcgtgccattgcagtgcagaagggcagtatcggcaacctcctgggcttcctagaggacagccttgccgccacacagttccagcagagccaggccagcctcctccacatgcagaacccaccctttgagccaactagtgtggacatgatgcggcgggctgcccgcgcgctgcttgccttggccaaggtggacgagaaccactcagagtttactctgtacgaatcacggctgttggacatctcggtatcaccgttgatgaactcattggtttcacaagtcatttgtgatgtactgtttttgattggccagtcatgacagccgtgggacacctcccccccccgtgtgtgtgtgcgtgtgtggagaacttagaaactgactgttgccctttatttatgcaaaaccacctcagaatccagtttaccctgtgctgtccagcttctcccttgggaaaaagtctctcctgtttctctctcctccttccacctcccctccctccatcacctcacgcctttctgttccttgtcctcaccttactcccctcaggaccctaccccaccctctttgaaaagacaaagctctgcctacatagaagactttttttattttaaccaaagttactgttgtttacagtgagtttggggaaaaaaaataaaataaaaatggctttcccagtccttgcatcaacgggatgccacatttcataactgtttttaatggtaaaaaaaaaaaaaaaaaatacaaaaaaaaattctgaaggacaaaaaaggtgactgctgaactgtgtgtggtttattgttgtacattcacaatcttgcaggagccaagaagttcgcagttgtgaacagaccctgttcactggagaggcctgtgcagtagagtgtagaccctttcatgtactgtactgtacacctgatactgtaaacatactgtaataataatgtctcacatggaaacagaaaacgctgggtcagcagcaagctgtagtttttaaaaatgtttttagttaaacgttgaggagaaaaaaaaaaaaggcttttcccccaaagtatcatgtgtgaacctacaacaccctgacctctttctctcctccttgattgtatgaataaccctgagatcacctcttagaactggttttaacctttagctgcagcggctacgctgccacgtgtgtatatatatgacgttgtacattgcacatacccttggatccccacagtttggtcctcctcccagctacccctttatagtatgacgagttaacaagttggtgacctgcacaaagcgagacacagctatttaatctcttgccagatatcgcccctcttggtgcgatgctgtacaggtctctgtaaaaagtccttgctgtctcagcagccaatcaacttatagtttatttttttctgggtttttgttttgttttgttttctttctaatcgaggtgtgaaaaagttctaggttcagttgaagttctgatgaagaaacacaattgagattttttcagtgataaaatctgcatatttgtatttcaacaatgtagctaaaacttgatgtaaattcctcctttttttccttttttggcttaatgaatatcatttattcagtatgaaatctttatactatatgttccacgtgttaagaataaatgtacattaaatcttggtaagacttt

SEQ ID NO: 81 - DNA, 8585 bp, Homo sapiens
cagaaagcggagagtcacagcggggccaggccctggggagcggagcctccaccgcccccctcattcccaggcaagggcttggggggaatgagccgggagagccgggtcccgagcctacagagccgggagcagctgagccgccggcgcctcggccgccgccgccgcctcctcctcctccgccgccgccagcccggagcctgagccggcggggcgggggggagaggagcgagcgcagcgcagcagcggagccccgcgaggcccgcccgggcgggtggggagggcagcccgggggactgggccccggggcggggtgggagggggggagaagacgaagacagggccgggtctctccgcggacgagacagcggggatcatggccgcgcaggtcgcccccgccgccgccagcagcctgggcaacccgccgccgccgccgccctcggagctgaagaaagccgagcagcagcagcgggaggaggcggggggcgaggcggcggcggcggcagcggccgagcgcggggaaatgaaggcagccgccgggcaggaaagcgagggccccgccgtggggccgccgcagccgctgggaaaggagctgcaggacggggccgagagcaatgggggtggcggcggcggcggagccggcagcggcggcgggcccggcgcggagccggacctgaagaactcgaacgggaacgcgggccctaggcccgccctgaacaataacctcacggagccgcccggcggcggcggtggcggcagcagcgatggggtgggggcgcctcctcactcagccgcggccgccttgccgcccccagcctacggcttcgggcaaccctacggccggagcccgtctgccgtcgccgccgccgcggccgccgtcttccaccaacaacatggcggacaacaaagccctggcctggcagcgctgcagagcggcggcggcgggggcctggagccctacgcggggccccagcagaactctcacgaccacggcttccccaaccaccagtacaactcctactaccccaaccgcagcgcctaccccccgcccgccccggcctacgcgctgagctccccgagaggtggcactccgggctccggcgcggcggcggctgccggctccaagccgcctccctcctccagcgcctccgcctcctcgtcgtcttcgtccttcgctcagcagcgcttcggggccatggggggaggcggcccctccgcggccggcgggggaactccccagcccaccgccacccccaccctcaaccaactgctcacgtcgcccagctcggcccggggctaccagggctaccccgggggcgactacagtggcgggccccaggacgggggcgccggcaagggcccggcggacatggcctcgcagtgttggggggctgcggcggcggcagctgcggcggcggccgcctcgggaggggcccaacaaaggagccaccacgcgcccatgagccccgggagcagcggcggcggggggcagccgctcgcccggacccctcagccatccagtccaatggatcagatgggcaagatgagacctcagccatatggcgggactaacccatactcgcagcaacagggacctccgtcaggaccgcagcaaggacatgggtacccagggcagccatacgggtcccagaccccgcagcggtacccgatgaccatgcagggccgggcgcagagtgccatgggcggcctctcttatacacagcagattcctccttatggacaacaaggccccagcgggtatggtcaacagggccagactccatattacaaccagcaaagtcctcaccctcagcagcagcagccaccctactcccagcaaccaccgtcccagacccctcatgcccaaccttcgtatcagcagcagccacagtctcaaccaccacagctccagtcctctcagcctccatactcccagcagccatcccagcctccacatcagcagtccccggctccatacccctcccagcagtcgacgacacagcagcacccccagagccagcccccctactcacagccacaggctcagtctccttaccagcagcagcaacctcagcagccagcaccctcgacgctctcccagcaggctgcgtatcctcagccccagtctcagcagtcccagcaaactgcctattcccagcagcgcttccctccaccgcaggagctatctcaagattcatttgggtctcaggcatcctcagccccctcaatgacctccagtaagggagggcaagaagatatgaacctgagccttcagtcaagaccctccagcttgcctgatctatctggttcaatagatgacctccccatggggacagaaggagctctgagtcctggagtgagcacatcagggatttccagcagccaaggagagcagagtaatccagctcagtctcctttctctcctcatacctcccctcacctgcctggcatccgaggcccttccccgtcccctgttggctctcccgccagtgttgctcagtctcgctcaggaccactctcgcctgctgcagtgccaggcaaccagatgccacctcggccacccagtggccagtcggacagcatcatgcatccttccatgaaccaatcaagcattgcccaagatcgaggttatatgcagaggaacccccagatgccccagtacagttccccccagcccggctcagccttatctccgcgtcagccttccggaggacagatacacacaggcatgggctcctaccagcagaactccatggggagctatggtccccaggggggtcagtatggcccacaaggtggctaccccaggcagccaaactataatgccttgcccaatgccaactaccccagtgcaggcatggctggaggcataaaccccatgggtgccggaggtcaaatgcatggacagcctggcatcccaccttatggcacactccctccagggaggatgagtcacgcctccatgggcaaccggccttatggccctaacatggccaatatgccacctcaggttgggtcagggatgtgtcccccaccagggggcatgaaccggaaaacccaagaaactgctgtcgccatgcatgttgctgccaactctatccaaaacaggccgccaggctaccccaatatgaatcaagggggcatgatgggaactggacctccttatggacaagggattaatagtatggctggcatgatcaaccctcagggacccccatattccatgggtggaaccatggccaacaattctgcagggatggcagccagcccagagatgatgggccttggggatgtaaagttaactccagccaccaaaatgaacaacaaggcagatgggacacccaagacagaatccaaatccaagaaatccagttcttctactacaaccaatgagaagatcaccaagttgtatgagctgggtggtgagcctgagaggaagatgtgggtggaccgttatctggccttcactgaggagaaggccatgggcatgacaaatctgcctgctgtgggtaggaaacctctggacctctatcgcctctatgtgtctgtgaaggagattggtggattgactcaggtcaacaagaacaaaaaatggcgggaacttgcaaccaacctcaatgtgggcacatcaagcagtgctgccagctccttgaaaaagcagtatatccagtgtctctatgcctttgaatgcaagattgaacggggagaagaccctcccccagacatctttgcagctgctgattccaagaagtcccagcccaagatccagcctccctctcctgcgggatcaggatctatgcaggggccccagactccccagtcaaccagcagttccatggcagaaggaggagacttaaagccaccaactccagcatccacaccacacagtcagatccccccattgccaggcatgagcaggagcaattcagttgggatccaggatgcctttaatgatggaagtgactccacattccagaagcggaattccatgactccaaaccctgggtatcagcccagtatgaatacctctgacatgatggggcgcatgtcctatgagccaaataaggatccttatggcagcatgaggaaagctccagggagtgatcccttcatgtcctcagggcagggccccaacggcgggatgggtgacccctacagtcgtgctgccggccctgggctaggaaatgtggcgatgggaccacgacagcactatccctatggaggtccttatgacagagtgaggacggagcctggaatagggcctgagggaaacatgagcactggggccccacagccgaatctcatgccttccaacccagactcggggatgtattctcctagccgctaccccccgcagcagcagcagcagcagcagcaacgacatgattcctatggcaatcagttctccacccaaggcaccccttctggcagccccttccccagccagcagactacaatgtatcaacagcaacagcagaattacaagcggccaatggatggcacatatggccctcctgccaagcggcacgaaggggagatgtacagcgtgccatacagcactgggcaggggcagcctcagcagcagcagttgcccccagcccagccccagcctgccagccagcaacaagctgcccagccttcccctcagcaagatgtatacaaccagtatggcaatgcctatcctgccactgccacagctgctactgagcgccgaccagcaggcggcccccagaaccaatttccattccagtttggccgagaccgtgtctctgcaccccctggcaccaatgcccagcaaaacatgccaccacaaatgatgggcggccccatacaggcatcagctgaggttgctcagcaaggcaccatgtggcaggggcgtaatgacatgacctataattatgccaacaggcagagcacgggctctgccccccagggccccgcctatcatggcgtgaaccgaacagatgaaatgctgcacacagatcagagggccaaccactaaggctcgtggccttcccatggcacacgccagcccccatatggtccctctgcccctgtgccccccatgacaaggccccctccatctaactaccagcccccaccaagcatgcagaatcacattcctcaggtatccagccctgctcccctgccccggccaatggagaaccgcacctctcctagcaagtctccattcctgcactctgggatgaaaatgcagaaggcaggtcccccagtacctgcctcgcacatagcacctgcccctgtgcagccccccatgattcggcgggatatcaccttcccacctggctctgttgaagccacacagcctgtgttgaagcagaggaggcggctcacaatgaaagacattggaaccccggaggcatggcgggtaatgatgtccctcaagtctggtctcctggcagagagcacatgggcattagataccatcaacatcctgctgtatgatgacaacagcatcatgaccttcaacctcagtcagctcccagggttgctagagctccttgtagaatatttccgacgatgcctgattgagatctttggcattttaaaggagtatgaggtgggtgacccaggacagagaacgctactggatcctgggaggttcagcaaggtgtctagtccagctcccatggagggtggggaagaagaagaagaacttctaggtcctaaactagaagaggaagaagaagaggaagtagttgaaaatgatgaggagatagccttttcaggcaaggacaagccagcttcagagaatagtgaggagaagctgatcagtaagtttgacaagcttccagtaaagatcgtacagaagaatgatccatttgtggtggactgctcagataagcttgggcgtgtgcaggagtttgacagtggcctgctgcactggcggattggtgggggggacaccactgagcatatccagacccacttcgagagcaagacagagctgctgccttcccggcctcacgcaccctgcccaccagcccctcggaagcatgtgacaacagcagagggtacaccagggacaacagaccaggaggggcccccacctgatggacctccagaaaaacggatcacagccactatggatgacatgttgtctactcggtctagcaccttgaccgaggatggagctaagagttcagaggccatcaaggagagcagcaagtttccatttggcattagcccagcacagagccaccggaacatcaagatcctagaggacgaaccccacagtaaggatgagaccccactgtgtacccttctggactggcaggattctcttgccaagcgctgcgtctgtgtgtccaataccattcgaagcctgtcatttgtgccaggcaatgactttgagatgtccaaacacccagggctgctgctcatcctgggcaagctgatcctgctgcaccacaagcacccagaacggaagcaggcaccactaacttatgaaaaggaggaggaacaggaccaaggggtgagctgcaacaaagtggagtggtggtgggactgcttggagatgctccgggaaaacaccttggttacactcgccaacatctcggggcagttggacctatctccataccccgagagcatttgcctgcctgtcctggacggactcctacactgggcagtttgcccttcagctgaagcccaggaccccttttccaccctgggccccaatgccgtcctttccccgcagagactggtcttggaaaccctcagcaaactcagcatccaggacaacaatgtggacctgattctggccacaccccccttcagccgcctggagaagttgtatagcactatggtgcgcttcctcagtgaccgaaagaacccggtgtgccgggagatggctgtggtactgctggccaacctggctcagggggacagcctggcagctcgtgccattgcagtgcagaagggcagtatcggcaacctcctgggcttcctagaggacagccttgccgccacacagttccagcagagccaggccagcctcctccacatgcagaacccaccctttgagccaactagtgtggacatgatgcggcgggctgcccgcgcgctgcttgccttggccaaggtggacgagaaccactcagagtttactctgtacgaatcacggctgttggacatctcggtatcaccgttgatgaactcattggtttcacaagtcatttgtgatgtactgtttttgattggccagtcatgacagccgtgggacacctcccccccccgtgtgtgtgtgcgtgtgtggagaacttagaaactgactgttgccctttatttatgcaaaaccacctcagaatccagtttaccctgtgctgtccagcttctcccttgggaaaaagtctctcctgtttctctctcctccttccacctcccctccctccatcacctcacgcctttctgttccttgtcctcaccttactcccctcaggaccctaccccaccctctttgaaaagacaaagctctgcctacatagaagactttttttattttaaccaaagttactgttgtttacagtgagtttggggaaaaaaaataaaataaaaatggctttcccagtccttgcatcaacgggatgccacatttcataactgtttttaatggtaaaaaaaaaaaaaaaaaatacaaaaaaaaattctgaaggacaaaaaaggtgactgctgaactgtgtgtggtttattgttgtacattcacaatcttgcaggagccaagaagttcgcagttgtgaacagaccctgttcactggagaggcctgtgcagtagagtgtagaccctttcatgtactgtactgtacacctgatactgtaaacatactgtaataataatgtctcacatggaaacagaaaacgctgggtcagcagcaagctgtagtttttaaaaatgtttttagttaaacgttgaggagaaaaaaaaaaaaggcttttcccccaaagtatcatgtgtgaacctacaacaccctgacctctttctctcctccttgattgtatgaataaccctgagatcacctcttagaactggttttaacctttagctgcagcggctacgctgccacgtgtgtatatatatgacgttgtacattgcacatacccttggatccccacagtttggtcctcctcccagctacccctttatagtatgacgagttaacaagttggtgacctgcacaaagcgagacacagctatttaatctcttgccagatatcgcccctcttggtgcgatgctgtacaggtctctgtaaaaagtccttgctgtctcagcagccaatcaacttatagtttatttttttctgggtttttgttttgttttgttttctttctaatcgaggtgtgaaaaagttctaggttcagttgaagttctgatgaagaaacacaattgagattttttcagtgataaaatctgcatatttgtatttcaacaatgtagctaaaacttgatgtaaattcctcctttttttccttttttggcttaatgaatatcatttattcagtatgaaatctttatactatatgttccacgtgttaagaataaatgtacattaaatcttggtaagacttt

SEQ ID NO: 82 - DNA, 8585 bp, Homo sapiens
cagaaagcggagagtcacagcggggccaggccctggggagcggagcctccaccgcccccctcattcccaggcaagggcttggggggaatgagccgggagagccgggtcccgagcctacagagccgggagcagctgagccgccggcgcctcggccgccgccgccgcctcctcctcctccgccgccgccagcccggagcctgagccggcggggcgggggggagaggagcgagcgcagcgcagcagcggagccccgcgaggcccgcccgggcgggtggggagggcagcccgggggactgggccccggggcggggtgggagggggggagaagacgaagacagggccgggtctctccgcggacgagacagcggggatcatggccgcgcaggtcgcccccgccgccgccagcagcctgggcaacccgccgccgccgccgccctcggagctgaagaaagccgagcagcagcagcgggaggaggcggggggcgaggcggcggcggcggcagcggccgagcgcggggaaatgaaggcagccgccgggcaggaaagcgagggccccgccgtggggccgccgcagccgctgggaaaggagctgcaggacggggccgagagcaatgggggtggcggcggcggcggagccggcagcggcggcgggcccggcgcggagccggacctgaagaactcgaacgggaacgcgggccctaggcccgccctgaacaataacctcacggagccgcccggcggcggcggtggcggcagcagcgatggggtgggggcgcctcctcactcagccgcggccgccttgccgcccccagcctacggcttcgggcaaccctacggccggagcccgtctgccgtcgccgccgccgcggccgccgtcttccaccaacaacatggcggacaacaaagccctggcctggcagcgctgcagagcggcggcggcgggggcctggagccctacgcggggccccagcagaactctcacgaccacggcttccccaaccaccagtacaactcctactaccccaaccgcagcgcctaccccccgcccgccccggcctacgcgctgagctccccgagaggtggcactccgggctccggcgcggcggcggctgccggctccaagccgcctccctcctccagcgcctccgcctcctcgtcgtcttcgtccttcgctcagcagcgcttcggggccatggggggaggcggcccctccgcggccggcgggggaactccccagcccaccgccacccccaccctcaaccaactgctcacgtcgcccagctcggcccggggctaccagggctaccccgggggcgactacagtggcgggccccaggacgggggcgccggcaagggcccggcggacatggcctcgcagtgttggggggctgcggcggcggcagctgcggcggcggccgcctcgggaggggcccaacaaaggagccaccacgcgcccatgagccccgggagcagcggcggcggggggcagccgctcgcccggacccctcagccatccagtccaatggatcagatgggcaagatgagacctcagccatatggcgggactaacccatactcgcagcaacagggacctccgtcaggaccgcagcaaggacatgggtacccagggcagccatacgggtcccagaccccgcagcggtacccgatgaccatgcagggccgggcgcagagtgccatgggcggcctctcttatacacagcagattcctccttatggacaacaaggccccagcgggtatggtcaacagggccagactccatattacaaccagcaaagtcctcaccctcagcagcagcagccaccctactcccagcaaccaccgtcccagacccctcatgcccaaccttcgtatcagcagcagccacagtctcaaccaccacagctccagtcctctcagcctccatactcccagcagccatcccagcctccacatcagcagtccccggctccatacccctcccagcagtcgacgacacagcagcacccccagagccagcccccctactcacagccacaggctcagtctccttaccagcagcagcaacctcagcagccagcaccctcgacgctctcccagcaggctgcgtatcctcagccccagtctcagcagtcccagcaaactgcctattcccagcagcgcttccctccaccgcaggagctatctcaagattcatttgggtctcaggcatcctcagccccctcaatgacctccagtaagggagggcaagaagatatgaacctgagccttcagtcaagaccctccagcttgcctgatctatctggttcaatagatgacctccccatggggacagaaggagctctgagtcctggagtgagcacatcagggatttccagcagccaaggagagcagagtaatccagctcagtctcctttctctcctcatacctcccctcacctgcctggcatccgaggcccttccccgtcccctgttggctctcccgccagtgttgctcagtctcgctcaggaccactctcgcctgctgcagtgccaggcaaccagatgccacctcggccacccagtggccagtcggacagcatcatgcatccttccatgaaccaatcaagcattgcccaagatcgaggttatatgcagaggaacccccagatgccccagtacagttccccccagcccggctcagccttatctccgcgtcagccttccggaggacagatacacacaggcatgggctcctaccagcagaactccatggggagctatggtccccaggggggtcagtatggcccacaaggtggctaccccaggcagccaaactataatgccttgcccaatgccaactaccccagtgcaggcatggctggaggcataaaccccatgggtgccggaggtcaaatgcatggacagcctggcatcccaccttatggcacactccctccagggaggatgagtcacgcctccatgggcaaccggccttatggccctaacatggccaatatgccacctcaggttgggtcagggatgtgtcccccaccagggggcatgaaccggaaaacccaagaaactgctgtcgccatgcatgttgctgccaactctatccaaaacaggccgccaggctaccccaatatgaatcaagggggcatgatgggaactggacctccttatggacaagggattaatagtatggctggcatgatcaaccctcagggacccccatattccatgggtggaaccatggccaacaattctgcagggatggcagccagcccagagatgatgggccttggggatgtaaagttaactccagccaccaaaatgaacaacaaggcagatgggacacccaagacagaatccaaatccaagaaatccagttcttctactacaaccaatgagaagatcaccaagttgtatgagctgggtggtgagcctgagaggaagatgtgggtggaccgttatctggccttcactgaggagaaggccatgggcatgacaaatctgcctgctgtgggtaggaaacctctggacctctatcgcctctatgtgtctgtgaaggagattggtggattgactcaggtcaacaagaacaaaaaatggcgggaacttgcaaccaacctcaatgtgggcacatcaagcagtgctgccagctccttgaaaaagcagtatatccagtgtctctatgcctttgaatgcaagattgaacggggagaagaccctcccccagacatctttgcagctgctgattccaagaagtcccagcccaagatccagcctccctctcctgcgggatcaggatctatgcaggggccccagactccccagtcaaccagcagttccatggcagaaggaggagacttaaagccaccaactccagcatccacaccacacagtcagatccccccattgccaggcatgagcaggagcaattcagttgggatccaggatgcctttaatgatggaagtgactccacattccagaagcggaattccatgactccaaaccctgggtatcagcccagtatgaatacctctgacatgatggggcgcatgtcctatgagccaaataaggatccttatggcagcatgaggaaagctccagggagtgatcccttcatgtcctcagggcagggccccaacggcgggatgggtgacccctacagtcgtgctgccggccctgggctaggaaatgtggcgatgggaccacgacagcactatccctatggaggtccttatgacagagtgaggacggagcctggaatagggcctgagggaaacatgagcactggggccccacagccgaatctcatgccttccaacccagactcggggatgtattctcctagccgctaccccccgcagcagcagcagcagcagcagcaacgacatgattcctatggcaatcagttctccacccaaggcaccccttctggcagccccttccccagccagcagactacaatgtatcaacagcaacagcagaattacaagcggccaatggatggcacatatggccctcctgccaagcggcacgaaggggagatgtacagcgtgccatacagcactgggcaggggcagcctcagcagcagcagttgcccccagcccagccccagcctgccagccagcaacaagctgcccagccttcccctcagcaagatgtatacaaccagtatggcaatgcctatcctgccactgccacagctgctactgagcgccgaccagcaggcggcccccagaaccaatttccattccagtttggccgagaccgtgtctctgcaccccctggcaccaatgcccagcaaaacatgccaccacaaatgatgggcggccccatacaggcatcagctgaggttgctcagcaaggcaccatgtggcaggggcgtaatgacatgacctataattatgccaacaggcagagcacgggctctgccccccagggccccgcctatcatggcgtgaaccgaacagatgaaatgctgcacacagatcagagggccaaccacgaaggctcgtggccttcccatggcacacgccagcccccatatggtccctctgcccctgtgccccccatgacaaggccccctccatctaactaccagcccccaccaagcatgcagaatcacattcctcaggtatccagccctgctcccctgccccggccaatggagaaccgcacctctcctagcaagtctccattcctgcactctgggatgaaaatgcagaaggcaggtcccccagtacctgcctcgcacatagcacctgcccctgtgcagccccccatgattcggcgggatatcaccttcccacctggctctgttgaagccacacagcctgtgttgaagcagaggaggcggctcacaatgaaagacattggaaccccggaggcatggcgggtaatgatgtccctcaagtctggtctcctggcagagagcacatgggcattagataccatcaacatcctgctgtatgatgacaacagcatcatgaccttcaacctcagtcagctcccagggttgctagagctccttgtagaatatttccgacgatgcctgattgagatctttggcattttaaaggagtatgaggtgggtgacccaggacagagaacgctactggatcctgggaggttcagcaaggtgtctagtccagctcccatggagggtggggaagaagaagaagaacttctaggtcctaaactagaagaggaagaagaagaggaagtagttgaaaatgatgaggagatagccttttcaggcaaggacaagccagcttcagagaatagtgaggagaagctgatcagtaagtttgacaagcttccagtaaagatcgtacagaagaatgatccatttgtggtggactgctcagataagcttgggcgtgtgcaggagtttgacagtggcctgctgcactggcggattggtgggggggacaccactgggcatatccagacccacttcgagagcaagacagagctgctgccttcccggcctcacgcaccctgcccaccagcccctcggaagcatgtgacaacagcagagggtacaccagggacaacagaccaggaggggcccccacctgatggacctccagaaaaacggatcacagccactatggatgacatgttgtctactcggtctagcaccttgaccgaggatggagctaagagttcagaggccatcaaggagagcagcaagtttccatttggcattagcccagcacagagccaccggaacatcaagatcctagaggacgaaccccacagtaaggatgagaccccactgtgtacccttctggactggcaggattctcttgccaagcgctgcgtctgtgtgtccaataccattcgaagcctgtcatttgtgccaggcaatgactttgagatgtccaaacacccagggctgctgctcatcctgggcaagctgatcctgctgcaccacaagcacccagaacggaagcaggcaccactaacttatgaaaaggaggaggaacaggaccaaggggtgagctgcaacaaagtggagtggtggtgggactgcttggagatgctccgggaaaacaccttggttacactcgccaacatctcggggcagttggacctatctccataccccgagagcatttgcctgcctgtcctggacggactcctacactgggcagtttgcccttcagctgaagcccaggaccccttttccaccctgggccccaatgccgtcctttccccgcagagactggtcttggaaaccctcagcaaactcagcatccaggacaacaatgtggacctgattctggccacaccccccttcagccgcctggagaagttgtatagcactatggtgcgcttcctcagtgaccgaaagaacccggtgtgccgggagatggctgtggtactgctggccaacctggctcagggggacagcctggcagctcgtgccattgcagtgcagaagggcagtatcggcaacctcctgggcttcctagaggacagccttgccgccacacagttccagcagagccaggccagcctcctccacatgcagaacccaccctttgagccaactagtgtggacatgatgcggcgggctgcccgcgcgctgcttgccttggccaaggtggacgagaaccactcagagtttactctgtacgaatcacggctgttggacatctcggtatcaccgttgatgaactcattggtttcacaagtcatttgtgatgtactgtttttgattggccagtcatgacagccgtgggacacctcccccccccgtgtgtgtgtgcgtgtgtggagaacttagaaactgactgttgccctttatttatgcaaaaccacctcagaatccagtttaccctgtgctgtccagcttctcccttgggaaaaagtctctcctgtttctctctcctccttccacctcccctccctccatcacctcacgcctttctgttccttgtcctcaccttactcccctcaggaccctaccccaccctctttgaaaagacaaagctctgcctacatagaagactttttttattttaaccaaagttactgttgtttacagtgagtttggggaaaaaaaataaaataaaaatggctttcccagtccttgcatcaacgggatgccacatttcataactgtttttaatggtaaaaaaaaaaaaaaaaaatacaaaaaaaaattctgaaggacaaaaaaggtgactgctgaactgtgtgtggtttattgttgtacattcacaatcttgcaggagccaagaagttcgcagttgtgaacagaccctgttcactggagaggcctgtgcagtagagtgtagaccctttcatgtactgtactgtacacctgatactgtaaacatactgtaataataatgtctcacatggaaacagaaaacgctgggtcagcagcaagctgtagtttttaaaaatgtttttagttaaacgttgaggagaaaaaaaaaaaaggcttttcccccaaagtatcatgtgtgaacctacaacaccctgacctctttctctcctccttgattgtatgaataaccctgagatcacctcttagaactggttttaacctttagctgcagcggctacgctgccacgtgtgtatatatatgacgttgtacattgcacatacccttggatccccacagtttggtcctcctcccagctacccctttatagtatgacgagttaacaagttggtgacctgcacaaagcgagacacagctatttaatctcttgccagatatcgcccctcttggtgcgatgctgtacaggtctctgtaaaaagtccttgctgtctcagcagccaatcaacttatagtttatttttttctgggtttttgttttgttttgttttctttctaatcgaggtgtgaaaaagttctaggttcagttgaagttctgatgaagaaacacaattgagattttttcagtgataaaatctgcatatttgtatttcaacaatgtagctaaaacttgatgtaaattcctcctttttttccttttttggcttaatgaatatcatttattcagtatgaaatctttatactatatgttccacgtgttaagaataaatgtacattaaatcttggtaagacttt

SEQ ID NO: 83 - DNA, 8585 bp, Homo sapiens
cagaaagcggagagtcacagcggggccaggccctggggagcggagcctccaccgcccccctcattcccaggcaagggcttggggggaatgagccgggagagccgggtcccgagcctacagagccgggagcagctgagccgccggcgcctcggccgccgccgccgcctcctcctcctccgccgccgccagcccggagcctgagccggcggggcgggggggagaggagcgagcgcagcgcagcagcggagccccgcgaggcccgcccgggcgggtggggagggcagcccgggggactgggccccggggcggggtgggagggggggagaagacgaagacagggccgggtctctccgcggacgagacagcggggatcatggccgcgcaggtcgcccccgccgccgccagcagcctgggcaacccgccgccgccgccgccctcggagctgaagaaagccgagcagcagcagcgggaggaggcggggggcgaggcggcggcggcggcagcggccgagcgcggggaaatgaaggcagccgccgggcaggaaagcgagggccccgccgtggggccgccgcagccgctgggaaaggagctgcaggacggggccgagagcaatgggggtggcggcggcggcggagccggcagcggcggcgggcccggcgcggagccggacctgaagaactcgaacgggaacgcgggccctaggcccgccctgaacaataacctcacggagccgcccggcggcggcggtggcggcagcagcgatggggtgggggcgcctcctcactcagccgcggccgccttgccgcccccagcctacggcttcgggcaaccctacggccggagcccgtctgccgtcgccgccgccgcggccgccgtcttccaccaacaacatggcggacaacaaagccctggcctggcagcgctgcagagcggcggcggcgggggcctggagccctacgcggggccccagcagaactctcacgaccacggcttccccaaccaccagtacaactcctactaccccaaccgcagcgcctaccccccgcccgccccggcctacgcgctgagctccccgagaggtggcactccgggctccggcgcggcggcggctgccggctccaagccgcctccctcctccagcgcctccgcctcctcgtcgtcttcgtccttcgctcagcagcgcttcggggccatggggggaggcggcccctccgcggccggcgggggaactccccagcccaccgccacccccaccctcaaccaactgctcacgtcgcccagctcggcccggggctaccagggctaccccgggggcgactacagtggcgggccccaggacgggggcgccggcaagggcccggcggacatggcctcgcagtgttggggggctgcggcggcggcagctgcggcggcggccgcctcgggaggggcccaacaaaggagccaccacgcgcccatgagccccgggagcagcggcggcggggggcagccgctcgcccggacccctcagccatccagtccaatggatcagatgggcaagatgagacctcagccatatggcgggactaacccatactcgcagcaacagggacctccgtcaggaccgcagcaaggacatgggtacccagggcagccatacgggtcccagaccccgcagcggtacccgatgaccatgcagggccgggcgcagagtgccatgggcggcctctcttatacacagcagattcctccttatggacaacaaggccccagcgggtatggtcaacagggccagactccatattacaaccagcaaagtcctcaccctcagcagcagcagccaccctactcccagcaaccaccgtcccagacccctcatgcccaaccttcgtatcagcagcagccacagtctcaaccaccacagctccagtcctctcagcctccatactcccagcagccatcccagcctccacatcagcagtccccggctccatacccctcccagcagtcgacgacacagcagcacccccagagccagcccccctactcacagccacaggctcagtctccttaccagcagcagcaacctcagcagccagcaccctcgacgctctcccagcaggctgcgtatcctcagccccagtctcagcagtcccagcaaactgcctattcccagcagcgcttccctccaccgcaggagctatctcaagattcatttgggtctcaggcatcctcagccccctcaatgacctccagtaagggagggcaagaagatatgaacctgagccttcagtcaagaccctccagcttgcctgatctatctggttcaatagatgacctccccatggggacagaaggagctctgagtcctggagtgagcacatcagggatttccagcagccaaggagagcagagtaatccagctcagtctcctttctctcctcatacctcccctcacctgcctggcatccgaggcccttccccgtcccctgttggctctcccgccagtgttgctcagtctcgctcaggaccactctcgcctgctgcagtgccaggcaaccagatgccacctcggccacccagtggccagtcggacagcatcatgcatccttccatgaaccaatcaagcattgcccaagatcgaggttatatgcagaggaacccccagatgccccagtacagttccccccagcccggctcagccttatctccgcgtcagccttccggaggacagatacacacaggcatgggctcctaccagcagaactccatggggagctatggtccccaggggggtcagtatggcccacaaggtggctaccccaggcagccaaactataatgccttgcccaatgccaactaccccagtgcaggcatggctggaggcataaaccccatgggtgccggaggtcaaatgcatggacagcctggcatcccaccttatggcacactccctccagggaggatgagtcacgcctccatgggcaaccggccttatggccctaacatggccaatatgccacctcaggttgggtcagggatgtgtcccccaccagggggcatgaaccggaaaacccaagaaactgctgtcgccatgcatgttgctgccaactctatccaaaacaggccgccaggctaccccaatatgaatcaagggggcatgatgggaactggacctccttatggacaagggattaatagtatggctggcatgatcaaccctcagggacccccatattccatgggtggaaccatggccaacaattctgcagggatggcagccagcccagagatgatgggccttggggatgtaaagttaactccagccaccaaaatgaacaacaaggcagatgggacacccaagacagaatccaaatccaagaaatccagttcttctactacaaccaatgagaagatcaccaagttgtatgagctgggtggtgagcctgagaggaagatgtgggtggaccgttatctggccttcactgaggagaaggccatgggcatgacaaatctgcctgctgtgggtaggaaacctctggacctctatcgcctctatgtgtctgtgaaggagattggtggattgactcaggtcaacaagaacaaaaaatggcgggaacttgcaaccaacctcaatgtgggcacatcaagcagtgctgccagctccttgaaaaagcagtatatccagtgtctctatgcctttgaatgcaagattgaacggggagaagaccctcccccagacatctttgcagctgctgattccaagaagtcccagcccaagatccagcctccctctcctgcgggatcaggatctatgcaggggccccagactccccagtcaaccagcagttccatggcagaaggaggagacttaaagccaccaactccagcatccacaccacacagtcagatccccccattgccaggcatgagcaggagcaattcagttgggatccaggatgcctttaatgatggaagtgactccacattccagaagcggaattccatgactccaaaccctgggtatcagcccagtatgaatacctctgacatgatggggcgcatgtcctatgagccaaataaggatccttatggcagcatgaggaaagctccagggagtgatcccttcatgtcctcagggcagggccccaacggcgggatgggtgacccctacagtcgtgctgccggccctgggctaggaaatgtggcgatgggaccacgacagcactatccctatggaggtccttatgacagagtgaggacggagcctggaatagggcctgagggaaacatgagcactggggccccacagccgaatctcatgccttccaacccagactcggggatgtattctcctagccgctaccccccgcagcagcagcagcagcagcagcaacgacatgattcctatggcaatcagttctccacccaaggcaccccttctggcagccccttccccagccagcagactacaatgtatcaacagcaacagcagaattacaagcggccaatggatggcacatatggccctcctgccaagcggcacgaaggggagatgtacagcgtgccatacagcactgggcaggggcagcctcagcagcagcagttgcccccagcccagccccagcctgccagccagcaacaagctgcccagccttcccctcagcaagatgtatacaaccagtatggcaatgcctatcctgccactgccacagctgctactgagcgccgaccagcaggcggcccccagaaccaatttccattccagtttggccgagaccgtgtctctgcaccccctggcaccaatgcccagcaaaacatgccaccacaaatgatgggcggccccatacaggcatcagctgaggttgctcagcaaggcaccatgtggcaggggcgtaatgacatgacctataattatgccaacaggcagagcacgggctctgccccccagggccccgcctatcatggcgtgaaccgaacagatgaaatgctgcacacagatcagagggccaaccacgaaggctcgtggccttcccatggcacacgccagcccccatatggtccctctgcccctgtgccccccatgacaaggccccctccatctaactaccagcccccaccaagcatgcagaatcacattcctcaggtatccagccctgctcccctgccccggccaatggagaaccgcacctctcctagcaagtctccattcctgcactctgggatgaaaatgtagaaggcaggtcccccagtacctgcctcgcacatagcacctgcccctgtgcagccccccatgattcggcgggatatcaccttcccacctggctctgttgaagccacacagcctgtgttgaagcagaggaggcggctcacaatgaaagacattggaaccccggaggcatggcgggtaatgatgtccctcaagtctggtctcctggcagagagcacatgggcattagataccatcaacatcctgctgtatgatgacaacagcatcatgaccttcaacctcagtcagctcccagggttgctagagctccttgtagaatatttccgacgatgcctgattgagatctttggcattttaaaggagtatgaggtgggtgacccaggacagagaacgctactggatcctgggaggttcagcaaggtgtctagtccagctcccatggagggtggggaagaagaagaagaacttctaggtcctaaactagaagaggaagaagaagaggaagtagttgaaaatgatgaggagatagccttttcaggcaaggacaagccagcttcagagaatagtgaggagaagctgatcagtaagtttgacaagcttccagtaaagatcgtacagaagaatgatccatttgtggtggactgctcagataagcttgggcgtgtgcaggagtttgacagtggcctgctgcactggcggattggtgggggggacaccactgagcatatccagacccacttcgagagcaagacagagctgctgccttcccggcctcacgcaccctgcccaccagcccctcggaagcatgtgacaacagcagagggtacaccagggacaacagaccaggaggggcccccacctgatggacctccagaaaaacggatcacagccactatggatgacatgttgtctactcggtctagcaccttgaccgaggatggagctaagagttcagaggccatcaaggagagcagcaagtttccatttggcattagcccagcacagagccaccggaacatcaagatcctagaggacgaaccccacagtaaggatgagaccccactgtgtacccttctggactggcaggattctcttgccaagcgctgcgtctgtgtgtccaataccattcgaagcctgtcatttgtgccaggcaatgactttgagatgtccaaacacccagggctgctgctcatcctgggcaagctgatcctgctgcaccacaagcacccagaacggaagcaggcaccactaacttatgaaaaggaggaggaacaggaccaaggggtgagctgcaacaaagtggagtggtggtgggactgcttggagatgctccgggaaaacaccttggttacactcgccaacatctcggggcagttggacctatctccataccccgagagcatttgcctgcctgtcctggacggactcctacactgggcagtttgcccttcagctgaagcccaggaccccttttccaccctgggccccaatgccgtcctttccccgcagagactggtcttggaaaccctcagcaaactcagcatccaggacaacaatgtggacctgattctggccacaccccccttcagccgcctggagaagttgtatagcactatggtgcgcttcctcagtgaccgaaagaacccggtgtgccgggagatggctgtggtactgctggccaacctggctcagggggacagcctggcagctcgtgccattgcagtgcagaagggcagtatcggcaacctcctgggcttcctagaggacagccttgccgccacacagttccagcagagccaggccagcctcctccacatgcagaacccaccctttgagccaactagtgtggacatgatgcggcgggctgcccgcgcgctgcttgccttggccaaggtggacgagaaccactcagagtttactctgtacgaatcacggctgttggacatctcggtatcaccgttgatgaactcattggtttcacaagtcatttgtgatgtactgtttttgattggccagtcatgacagccgtgggacacctcccccccccgtgtgtgtgtgcgtgtgtggagaacttagaaactgactgttgccctttatttatgcaaaaccacctcagaatccagtttaccctgtgctgtccagcttctcccttgggaaaaagtctctcctgtttctctctcctccttccacctcccctccctccatcacctcacgcctttctgttccttgtcctcaccttactcccctcaggaccctaccccaccctctttgaaaagacaaagctctgcctacatagaagactttttttattttaaccaaagttactgttgtttacagtgagtttggggaaaaaaaataaaataaaaatggctttcccagtccttgcatcaacgggatgccacatttcataactgtttttaatggtaaaaaaaaaaaaaaaaaatacaaaaaaaaattctgaaggacaaaaaaggtgactgctgaactgtgtgtggtttattgttgtacattcacaatcttgcaggagccaagaagttcgcagttgtgaacagaccctgttcactggagaggcctgtgcagtagagtgtagaccctttcatgtactgtactgtacacctgatactgtaaacatactgtaataataatgtctcacatggaaacagaaaacgctgggtcagcagcaagctgtagtttttaaaaatgtttttagttaaacgttgaggagaaaaaaaaaaaaggcttttcccccaaagtatcatgtgtgaacctacaacaccctgacctctttctctcctccttgattgtatgaataaccctgagatcacctcttagaactggttttaacctttagctgcagcggctacgctgccacgtgtgtatatatatgacgttgtacattgcacatacccttggatccccacagtttggtcctcctcccagctacccctttatagtatgacgagttaacaagttggtgacctgcacaaagcgagacacagctatttaatctcttgccagatatcgcccctcttggtgcgatgctgtacaggtctctgtaaaaagtccttgctgtctcagcagccaatcaacttatagtttatttttttctgggtttttgttttgttttgttttctttctaatcgaggtgtgaaaaagttctaggttcagttgaagttctgatgaagaaacacaattgagattttttcagtgataaaatctgcatatttgtatttcaacaatgtagctaaaacttgatgtaaattcctcctttttttccttttttggcttaatgaatatcatttattcagtatgaaatctttatactatatgttccacgtgttaagaataaatgtacattaaatcttggtaagacttt

SEQ ID NO: 84 - DNA, 8586 bp, Homo sapiens
cagaaagcggagagtcacagcggggccaggccctggggagcggagcctccaccgcccccctcattcccaggcaagggcttggggggaatgagccgggagagccgggtcccgagcctacagagccgggagcagctgagccgccggcgcctcggccgccgccgccgcctcctcctcctccgccgccgccagcccggagcctgagccggcggggcgggggggagaggagcgagcgcagcgcagcagcggagccccgcgaggcccgcccgggcgggtggggagggcagcccgggggactgggccccggggcggggtgggagggggggagaagacgaagacagggccgggtctctccgcggacgagacagcggggatcatggccgcgcaggtcgcccccgccgccgccagcagcctgggcaacccgccgccgccgccgccctcggagctgaagaaagccgagcagcagcagcgggaggaggcggggggcgaggcggcggcggcggcagcggccgagcgcggggaaatgaaggcagccgccgggcaggaaagcgagggccccgccgtggggccgccgcagccgctgggaaaggagctgcaggacggggccgagagcaatgggggtggcggcggcggcggagccggcagcggcggcgggcccggcgcggagccggacctgaagaactcgaacgggaacgcgggccctaggcccgccctgaacaataacctcacggagccgcccggcggcggcggtggcggcagcagcgatggggtgggggcgcctcctcactcagccgcggccgccttgccgcccccagcctacggcttcgggcaaccctacggccggagcccgtctgccgtcgccgccgccgcggccgccgtcttccaccaacaacatggcggacaacaaagccctggcctggcagcgctgcagagcggcggcggcgggggcctggagccctacgcggggccccagcagaactctcacgaccacggcttccccaaccaccagtacaactcctactaccccaaccgcagcgcctaccccccgcccgccccggcctacgcgctgagctccccgagaggtggcactccgggctccggcgcggcggcggctgccggctccaagccgcctccctcctccagcgcctccgcctcctcgtcgtcttcgtccttcgctcagcagcgcttcggggccatggggggaggcggcccctccgcggccggcgggggaactccccagcccaccgccacccccaccctcaaccaactgctcacgtcgcccagctcggcccggggctaccagggctaccccgggggcgactacagtggcgggccccaggacgggggcgccggcaagggcccggcggacatggcctcgcagtgttggggggctgcggcggcggcagctgcggcggcggccgcctcgggaggggcccaacaaaggagccaccacgcgcccatgagccccgggagcagcggcggcggggggcagccgctcgcccggacccctcagccatccagtccaatggatcagatgggcaagatgagacctcagccatatggcgggactaacccatactcgcagcaacagggacctccgtcaggaccgcagcaaggacatgggtacccagggcagccatacgggtcccagaccccgcagcggtacccgatgaccatgcagggccgggcgcagagtgccatgggcggcctctcttatacacagcagattcctccttatggacaacaaggccccagcgggtatggtcaacagggccagactccatattacaaccagcaaagtcctcaccctcagcagcagcagccaccctactcccagcaaccaccgtcccagacccctcatgcccaaccttcgtatcagcagcagccacagtctcaaccaccacagctccagtcctctcagcctccatactcccagcagccatcccagcctccacatcagcagtccccggctccatacccctcccagcagtcgacgacacagcagcacccccagagccagcccccctactcacagccacaggctcagtctccttaccagcagcagcaacctcagcagccagcaccctcgacgctctcccagcaggctgcgtatcctcagccccagtctcagcagtcccagcaaactgcctattcccagcagcgcttccctccaccgcaggagctatctcaagattcatttgggtctcaggcatcctcagccccctcaatgacctccagtaagggagggcaagaagatatgaacctgagccttcagtcaagaccctccagcttgcctgatctatctggttcaatagatgacctccccatggggacagaaggagctctgagtcctggagtgagcacatcagggatttccagcagccaaggagagcagagtaatccagctcagtctcctttctctcctcatacctcccctcacctgcctggcatccgaggcccttccccgtcccctgttggctctcccgccagtgttgctcagtctcgctcaggaccactctcgcctgctgcagtgccaggcaaccagatgccacctcggccacccagtggccagtcggacagcatcatgcatccttccatgaaccaatcaagcattgcccaagatcgaggttatatgcagaggaacccccagatgccccagtacagttccccccagcccggctcagccttatctccgcgtcagccttccggaggacagatacacacaggcatgggctcctaccagcagaactccatggggagctatggtccccaggggggtcagtatggcccacaaggtggctaccccaggcagccaaactataatgccttgcccaatgccaactaccccagtgcaggcatggctggaggcataaaccccatgggtgccggaggtcaaatgcatggacagcctggcatcccaccttatggcacactccctccagggaggatgagtcacgcctccatgggcaaccggccttatggccctaacatggccaatatgccacctcaggttgggtcagggatgtgtcccccaccagggggcatgaaccggaaaacccaagaaactgctgtcgccatgcatgttgctgccaactctatccaaaacaggccgccaggctaccccaatatgaatcaagggggcatgatgggaactggacctccttatggacaagggattaatagtatggctggcatgatcaaccctcagggacccccatattccatgggtggaaccatggccaacaattctgcagggatggcagccagcccagagatgatgggccttggggatgtaaagttaactccagccaccaaaatgaacaacaaggcagatgggacacccaagacagaatccaaatccaagaaatccagttcttctactacaaccaatgagaagatcaccaagttgtatgagctgggtggtgagcctgagaggaagatgtgggtggaccgttatctggccttcactgaggagaaggccatgggcatgacaaatctgcctgctgtgggtaggaaacctctggacctctatcgcctctatgtgtctgtgaaggagattggtggattgactcaggtcaacaagaacaaaaaatggcgggaacttgcaaccaacctcaatgtgggcacatcaagcagtgctgccagctccttgaaaaagcagtatatccagtgtctctatgcctttgaatgcaagattgaacggggagaagaccctcccccagacatctttgcagctgctgattccaagaagtcccagcccaagatccagcctccctctcctgcgggatcaggatctatgcaggggccccagactccccagtcaaccagcagttccatggcagaaggaggagacttaaagccaccaactccagcatccacaccacacagtcagatccccccattgccaggcatgagcaggagcaattcagttgggatccaggatgcctttaatgatggaagtgactccacattccagaagcggaattccatgactccaaaccctgggtatcagcccagtatgaatacctctgacatgatggggcgcatgtcctatgagccaaataaggatccttatggcagcatgaggaaagctccagggagtgatcccttcatgtcctcagggcagggccccaacggcgggatgggtgacccctacagtcgtgctgccggccctgggctaggaaatgtggcgatgggaccacgacagcactatccctatggaggtccttatgacagagtgaggacggagcctggaatagggcctgagggaaacatgagcactggggccccacagccgaatctcatgccttccaacccagactcggggatgtattctcctagccgctaccccccgcagcagcagcagcagcagcagcaacgacatgattcctatggcaatcagttctccacccaaggcaccccttctggcagccccttccccagccagcagactacaatgtatcaacagcaacagcagaattacaagcggccaatggatggcacatatggccctcctgccaagcggcacgaaggggagatgtacagcgtgccatacagcactgggcaggggcagcctcagcagcagcagttgcccccagcccagccccagcctgccagccagcaacaagctgcccagccttcccctcagcaagatgtatacaaccagtatggcaatgcctatcctgccactgccacagctgctactgagcgccgaccagcaggcggcccccagaaccaatttccattccagtttggccgagacacgtgtctctgcaccccctggcaccaatgcccagcaaaacatgccaccacaaatgatgggcggccccatacaggcatcagctgaggttgctcagcaaggcaccatgtggcaggggcgtaatgacatgacctataattatgccaacaggcagagcacgggctctgccccccagggccccgcctatcatggcgtgaaccgaacagatgaaatgctgcacacagatcagagggccaaccacgaaggctcgtggccttcccatggcacacgccagcccccatatggtccctctgcccctgtgccccccatgacaaggccccctccatctaactaccagcccccaccaagcatgcagaatcacattcctcaggtatccagccctgctcccctgccccggccaatggagaaccgcacctctcctagcaagtctccattcctgcactctgggatgaaaatgcagaaggcaggtcccccagtacctgcctcgcacatagcacctgcccctgtgcagccccccatgattcggcgggatatcaccttcccacctggctctgttgaagccacacagcctgtgttgaagcagaggaggcggctcacaatgaaagacattggaaccccggaggcatggcgggtaatgatgtccctcaagtctggtctcctggcagagagcacatgggcattagataccatcaacatcctgctgtatgatgacaacagcatcatgaccttcaacctcagtcagctcccagggttgctagagctccttgtagaatatttccgacgatgcctgattgagatctttggcattttaaaggagtatgaggtgggtgacccaggacagagaacgctactggatcctgggaggttcagcaaggtgtctagtccagctcccatggagggtggggaagaagaagaagaacttctaggtcctaaactagaagaggaagaagaagaggaagtagttgaaaatgatgaggagatagccttttcaggcaaggacaagccagcttcagagaatagtgaggagaagctgatcagtaagtttgacaagcttccagtaaagatcgtacagaagaatgatccatttgtggtggactgctcagataagcttgggcgtgtgcaggagtttgacagtggcctgctgcactggcggattggtgggggggacaccactgagcatatccagacccacttcgagagcaagacagagctgctgccttcccggcctcacgcaccctgcccaccagcccctcggaagcatgtgacaacagcagagggtacaccagggacaacagaccaggaggggcccccacctgatggacctccagaaaaacggatcacagccactatggatgacatgttgtctactcggtctagcaccttgaccgaggatggagctaagagttcagaggccatcaaggagagcagcaagtttccatttggcattagcccagcacagagccaccggaacatcaagatcctagaggacgaaccccacagtaaggatgagaccccactgtgtacccttctggactggcaggattctcttgccaagcgctgcgtctgtgtgtccaataccattcgaagcctgtcatttgtgccaggcaatgactttgagatgtccaaacacccagggctgctgctcatcctgggcaagctgatcctgctgcaccacaagcacccagaacggaagcaggcaccactaacttatgaaaaggaggaggaacaggaccaaggggtgagctgcaacaaagtggagtggtggtgggactgcttggagatgctccgggaaaacaccttggttacactcgccaacatctcggggcagttggacctatctccataccccgagagcatttgcctgcctgtcctggacggactcctacactgggcagtttgcccttcagctgaagcccaggaccccttttccaccctgggccccaatgccgtcctttccccgcagagactggtcttggaaaccctcagcaaactcagcatccaggacaacaatgtggacctgattctggccacaccccccttcagccgcctggagaagttgtatagcactatggtgcgcttcctcagtgaccgaaagaacccggtgtgccgggagatggctgtggtactgctggccaacctggctcagggggacagcctggcagctcgtgccattgcagtgcagaagggcagtatcggcaacctcctgggcttcctagaggacagccttgccgccacacagttccagcagagccaggccagcctcctccacatgcagaacccaccctttgagccaactagtgtggacatgatgcggcgggctgcccgcgcgctgcttgccttggccaaggtggacgagaaccactcagagtttactctgtacgaatcacggctgttggacatctcggtatcaccgttgatgaactcattggtttcacaagtcatttgtgatgtactgtttttgattggccagtcatgacagccgtgggacacctcccccccccgtgtgtgtgtgcgtgtgtggagaacttagaaactgactgttgccctttatttatgcaaaaccacctcagaatccagtttaccctgtgctgtccagcttctcccttgggaaaaagtctctcctgtttctctctcctccttccacctcccctccctccatcacctcacgcctttctgttccttgtcctcaccttactcccctcaggaccctaccccaccctctttgaaaagacaaagctctgcctacatagaagactttttttattttaaccaaagttactgttgtttacagtgagtttggggaaaaaaaataaaataaaaatggctttcccagtccttgcatcaacgggatgccacatttcataactgtttttaatggtaaaaaaaaaaaaaaaaaatacaaaaaaaaattctgaaggacaaaaaaggtgactgctgaactgtgtgtggtttattgttgtacattcacaatcttgcaggagccaagaagttcgcagttgtgaacagaccctgttcactggagaggcctgtgcagtagagtgtagaccctttcatgtactgtactgtacacctgatactgtaaacatactgtaataataatgtctcacatggaaacagaaaacgctgggtcagcagcaagctgtagtttttaaaaatgtttttagttaaacgttgaggagaaaaaaaaaaaaggcttttcccccaaagtatcatgtgtgaacctacaacaccctgacctctttctctcctccttgattgtatgaataaccctgagatcacctcttagaactggttttaacctttagctgcagcggctacgctgccacgtgtgtatatatatgacgttgtacattgcacatacccttggatccccacagtttggtcctcctcccagctacccctttatagtatgacgagttaacaagttggtgacctgcacaaagcgagacacagctatttaatctcttgccagatatcgcccctcttggtgcgatgctgtacaggtctctgtaaaaagtccttgctgtctcagcagccaatcaacttatagtttatttttttctgggtttttgttttgttttgttttctttctaatcgaggtgtgaaaaagttctaggttcagttgaagttctgatgaagaaacacaattgagattttttcagtgataaaatctgcatatttgtatttcaacaatgtagctaaaacttgatgtaaattcctcctttttttccttttttggcttaatgaatatcatttattcagtatgaaatctttatactatatgttccacgtgttaagaataaatgtacattaaatcttggtaagacttt

SEQ ID NO: 85 - DNA, 8586 bp, Homo sapiens
cagaaagcggagagtcacagcggggccaggccctggggagcggagcctccaccgcccccctcattcccaggcaagggcttggggggaatgagccgggagagccgggtcccgagcctacagagccgggagcagctgagccgccggcgcctcggccgccgccgccgcctcctcctcctccgccgccgccagcccggagcctgagccggcggggcgggggggagaggagcgagcgcagcgcagcagcggagccccgcgaggcccgcccgggcgggtggggagggcagcccgggggactgggccccggggcggggtgggagggggggagaagacgaagacagggccgggtctctccgcggacgagacagcggggatcatggccgcgcaggtcgcccccgccgccgccagcagcctgggcaacccgccgccgccgccgccctcggagctgaagaaagccgagcagcagcagcgggaggaggcggggggcgaggcggcggcggcggcagcggccgagcgcggggaaatgaaggcagccgccgggcaggaaagcgagggccccgccgtggggccgccgcagccgctgggaaaggagctgcaggacggggccgagagcaatgggggtggcggcggcggcggagccggcagcggcggcgggcccggcgcggagccggacctgaagaactcgaacgggaacgcgggccctaggcccgccctgaacaataacctcacggagccgcccggcggcggcggtggcggcagcagcgatggggtgggggcgcctcctcactcagccgcggccgccttgccgcccccagcctacggcttcgggcaaccctacggccggagcccgtctgccgtcgccgccgccgcggccgccgtcttccaccaacaacatggcggacaacaaagccctggcctggcagcgctgcagagcggcggcggcgggggcctggagccctacgcggggccccagcagaactctcacgaccacggcttccccaaccaccagtacaactcctactaccccaaccgcagcgcctaccccccgcccgccccggcctacgcgctgagctccccgagaggtggcactccgggctccggcgcggcggcggctgccggctccaagccgcctccctcctccagcgcctccgcctcctcgtcgtcttcgtccttcgctcagcagcgcttcggggccatggggggaggcggcccctccgcggccggcgggggaactccccagcccaccgccacccccaccctcaaccaactgctcacgtcgcccagctcggcccggggctaccagggctaccccgggggcgactacagtggcgggccccaggacgggggcgccggcaagggcccggcggacatggcctcgcagtgttggggggctgcggcggcggcagctgcggcggcggccgcctcgggaggggcccaacaaaggagccaccacgcgcccatgagccccgggagcagcggcggcggggggcagccgctcgcccggacccctcagccatccagtccaatggatcagatgggcaagatgagacctcagccatatggcgggactaacccatactcgcagcaacagggacctccgtcaggaccgcagcaaggacatgggtacccagggcagccatacgggtcccagaccccgcagcggtacccgatgaccatgcagggccgggcgcagagtgccatgggcggcctctcttatacacagcagattcctccttatggacaacaaggccccagcgggtatggtcaacagggccagactccatattacaaccagcaaagtcctcaccctcagcagcagcagccaccctactcccagcaaccaccgtcccagacccctcatgcccaaccttcgtatcagcagcagccacagtctcaaccaccacagctccagtcctctcagcctccatactcccagcagccatcccagcctccacatcagcagtccccggctccatacccctcccagcagtcgacgacacagcagcacccccagagccagcccccctactcacagccacaggctcagtctccttaccagcagcagcaacctcagcagccagcaccctcgacgctctcccagcaggctgcgtatcctcagccccagtctcagcagtcccagcaaactgcctattcccagcagcgcttccctccaccgcaggagctatctcaagattcatttgggtctcaggcatcctcagccccctcaatgacctccagtaagggagggcaagaagatatgaacctgagccttcagtcaagaccctccagcttgcctgatctatctggttcaatagatgacctccccatggggacagaaggagctctgagtcctggagtgagcacatcagggatttccagcagccaaggagagcagagtaatccagctcagtctcctttctctcctcatacctcccctcacctgcctggcatccgaggcccttccccgtcccctgttggctctcccgccagtgttgctcagtctcgctcaggaccactctcgcctgctgcagtgccaggcaaccagatgccacctcggccacccagtggccagtcggacagcatcatgcatccttccatgaaccaatcaagcattgcccaagatcgaggttatatgcagaggaacccccagatgccccagtacagttccccccagcccggctcagccttatctccgcgtcagccttccggaggacagatacacacaggcatgggctcctaccagcagaactccatggggagctatggtccccaggggggtcagtatggcccacaaggtggctaccccaggcagccaaactataatgccttgcccaatgccaactaccccagtgcaggcatggctggaggcataaaccccatgggtgccggaggtcaaatgcatggacagcctggcatcccaccttatggcacactccctccagggaggatgagtcacgcctccatgggcaaccggccttatggccctaacatggccaatatgccacctcaggttgggtcagggatgtgtcccccaccagggggcatgaaccggaaaacccaagaaactgctgtcgccatgcatgttgctgccaactctatccaaaacaggccgccaggctaccccaatatgaatcaagggggcatgatgggaactggacctccttatggacaagggattaatagtatggctggcatgatcaaccctcagggacccccatattccatgggtggaaccatggccaacaattctgcagggatggcagccagcccagagatgatgggccttggggatgtaaagttaactccagccaccaaaatgaacaacaaggcagatgggacacccaagacagaatccaaatccaagaaatccagttcttctactacaaccaatgagaagatcaccaagttgtatgagctgggtggtgagcctgagaggaagatgtgggtggaccgttatctggccttcactgaggagaaggccatgggcatgacaaatctgcctgctgtgggtaggaaacctctggacctctatcgcctctatgtgtctgtgaaggagattggtggattgactcaggtcaacaagaacaaaaaatggcgggaacttgcaaccaacctcaatgtgggcacatcaagcagtgctgccagctccttgaaaaagcagtatatccagtgtctctatgcctttgaatgcaagattgaacggggagaagaccctcccccagacatctttgcagctgctgattccaagaagtcccagcccaagatccagcctccctctcctgcgggatcaggatctatgcaggggccccagactccccagtcaaccagcagttccatggcagaaggaggagacttaaagccaccaactccagcatccacaccacacagtcagatccccccattgccaggcatgagcaggagcaattcagttgggatccaggatgcctttaatgatggaagtgactccacattccagaagcggaattccatgactccaaaccctgggtatcagcccagtatgaatacctctgacatgatggggcgcatgtcctatgagccaaataaggatccttatggcagcatgaggaaagctccagggagtgatcccttcatgtcctcagggcagggccccaacggcgggatgggtgacccctacagtcgtgctgccggccctgggctaggaaatgtggcgatgggaccacgacagcactatccctatggaggtccttatgacagagtgaggacggagcctggaatagggcctgagggaaacatgagcactggggccccacagccgaatctcatgccttccaacccagactcggggatgtattctcctagccgctaccccccgcagcagcagcagcagcagcagcaacgacatgattcctatggcaatcagttctccacccaaggcaccccttctggcagccccttccccagccagcagactacaatgtatcaacagcaacagcagaattacaagcggccaatggatggcacataatggccctcctgccaagcggcacgaaggggagatgtacagcgtgccatacagcactgggcaggggcagcctcagcagcagcagttgcccccagcccagccccagcctgccagccagcaacaagctgcccagccttcccctcagcaagatgtatacaaccagtatggcaatgcctatcctgccactgccacagctgctactgagcgccgaccagcaggcggcccccagaaccaatttccattccagtttggccgagaccgtgtctctgcaccccctggcaccaatgcccagcaaaacatgccaccacaaatgatgggcggccccatacaggcatcagctgaggttgctcagcaaggcaccatgtggcaggggcgtaatgacatgacctataattatgccaacaggcagagcacgggctctgccccccagggccccgcctatcatggcgtgaaccgaacagatgaaatgctgcacacagatcagagggccaaccacgaaggctcgtggccttcccatggcacacgccagcccccatatggtccctctgcccctgtgccccccatgacaaggccccctccatctaactaccagcccccaccaagcatgcagaatcacattcctcaggtatccagccctgctcccctgccccggccaatggagaaccgcacctctcctagcaagtctccattcctgcactctgggatgaaaatgcagaaggcaggtcccccagtacctgcctcgcacatagcacctgcccctgtgcagccccccatgattcggcgggatatcaccttcccacctggctctgttgaagccacacagcctgtgttgaagcagaggaggcggctcacaatgaaagacattggaaccccggaggcatggcgggtaatgatgtccctcaagtctggtctcctggcagagagcacatgggcattagataccatcaacatcctgctgtatgatgacaacagcatcatgaccttcaacctcagtcagctcccagggttgctagagctccttgtagaatatttccgacgatgcctgattgagatctttggcattttaaaggagtatgaggtgggtgacccaggacagagaacgctactggatcctgggaggttcagcaaggtgtctagtccagctcccatggagggtggggaagaagaagaagaacttctaggtcctaaactagaagaggaagaagaagaggaagtagttgaaaatgatgaggagatagccttttcaggcaaggacaagccagcttcagagaatagtgaggagaagctgatcagtaagtttgacaagcttccagtaaagatcgtacagaagaatgatccatttgtggtggactgctcagataagcttgggcgtgtgcaggagtttgacagtggcctgctgcactggcggattggtgggggggacaccactgagcatatccagacccacttcgagagcaagacagagctgctgccttcccggcctcacgcaccctgcccaccagcccctcggaagcatgtgacaacagcagagggtacaccagggacaacagaccaggaggggcccccacctgatggacctccagaaaaacggatcacagccactatggatgacatgttgtctactcggtctagcaccttgaccgaggatggagctaagagttcagaggccatcaaggagagcagcaagtttccatttggcattagcccagcacagagccaccggaacatcaagatcctagaggacgaaccccacagtaaggatgagaccccactgtgtacccttctggactggcaggattctcttgccaagcgctgcgtctgtgtgtccaataccattcgaagcctgtcatttgtgccaggcaatgactttgagatgtccaaacacccagggctgctgctcatcctgggcaagctgatcctgctgcaccacaagcacccagaacggaagcaggcaccactaacttatgaaaaggaggaggaacaggaccaaggggtgagctgcaacaaagtggagtggtggtgggactgcttggagatgctccgggaaaacaccttggttacactcgccaacatctcggggcagttggacctatctccataccccgagagcatttgcctgcctgtcctggacggactcctacactgggcagtttgcccttcagctgaagcccaggaccccttttccaccctgggccccaatgccgtcctttccccgcagagactggtcttggaaaccctcagcaaactcagcatccaggacaacaatgtggacctgattctggccacaccccccttcagccgcctggagaagttgtatagcactatggtgcgcttcctcagtgaccgaaagaacccggtgtgccgggagatggctgtggtactgctggccaacctggctcagggggacagcctggcagctcgtgccattgcagtgcagaagggcagtatcggcaacctcctgggcttcctagaggacagccttgccgccacacagttccagcagagccaggccagcctcctccacatgcagaacccaccctttgagccaactagtgtggacatgatgcggcgggctgcccgcgcgctgcttgccttggccaaggtggacgagaaccactcagagtttactctgtacgaatcacggctgttggacatctcggtatcaccgttgatgaactcattggtttcacaagtcatttgtgatgtactgtttttgattggccagtcatgacagccgtgggacacctcccccccccgtgtgtgtgtgcgtgtgtggagaacttagaaactgactgttgccctttatttatgcaaaaccacctcagaatccagtttaccctgtgctgtccagcttctcccttgggaaaaagtctctcctgtttctctctcctccttccacctcccctccctccatcacctcacgcctttctgttccttgtcctcaccttactcccctcaggaccctaccccaccctctttgaaaagacaaagctctgcctacatagaagactttttttattttaaccaaagttactgttgtttacagtgagtttggggaaaaaaaataaaataaaaatggctttcccagtccttgcatcaacgggatgccacatttcataactgtttttaatggtaaaaaaaaaaaaaaaaaatacaaaaaaaaattctgaaggacaaaaaaggtgactgctgaactgtgtgtggtttattgttgtacattcacaatcttgcaggagccaagaagttcgcagttgtgaacagaccctgttcactggagaggcctgtgcagtagagtgtagaccctttcatgtactgtactgtacacctgatactgtaaacatactgtaataataatgtctcacatggaaacagaaaacgctgggtcagcagcaagctgtagtttttaaaaatgtttttagttaaacgttgaggagaaaaaaaaaaaaggcttttcccccaaagtatcatgtgtgaacctacaacaccctgacctctttctctcctccttgattgtatgaataaccctgagatcacctcttagaactggttttaacctttagctgcagcggctacgctgccacgtgtgtatatatatgacgttgtacattgcacatacccttggatccccacagtttggtcctcctcccagctacccctttatagtatgacgagttaacaagttggtgacctgcacaaagcgagacacagctatttaatctcttgccagatatcgcccctcttggtgcgatgctgtacaggtctctgtaaaaagtccttgctgtctcagcagccaatcaacttatagtttatttttttctgggtttttgttttgttttgttttctttctaatcgaggtgtgaaaaagttctaggttcagttgaagttctgatgaagaaacacaattgagattttttcagtgataaaatctgcatatttgtatttcaacaatgtagctaaaacttgatgtaaattcctcctttttttccttttttggcttaatgaatatcatttattcagtatgaaatctttatactatatgttccacgtgttaagaataaatgtacattaaatcttggtaagacttt

SEQ ID NO: 86 - DNA, 8586 bp, Homo sapiens
cagaaagcggagagtcacagcggggccaggccctggggagcggagcctccaccgcccccctcattcccaggcaagggcttggggggaatgagccgggagagccgggtcccgagcctacagagccgggagcagctgagccgccggcgcctcggccgccgccgccgcctcctcctcctccgccgccgccagcccggagcctgagccggcggggcgggggggagaggagcgagcgcagcgcagcagcggagccccgcgaggcccgcccgggcgggtggggagggcagcccgggggactgggccccggggcggggtgggagggggggagaagacgaagacagggccgggtctctccgcggacgagacagcggggatcatggccgcgcaggtcgcccccgccgccgccagcagcctgggcaacccgccgccgccgccgccctcggagctgaagaaagccgagcagcagcagcgggaggaggcggggggcgaggcggcggcggcggcagcggccgagcgcggggaaatgaaggcagccgccgggcaggaaagcgagggccccgccgtggggccgccgcagccgctgggaaaggagctgcaggacggggccgagagcaatgggggtggcggcggcggcggagccggcagcggcggcgggcccggcgcggagccggacctgaagaactcgaacgggaacgcgggccctaggcccgccctgaacaataacctcacggagccgcccggcggcggcggtggcggcagcagcgatggggtgggggcgcctcctcactcagccgcggccgccttgccgcccccagcctacggcttcgggcaaccctacggccggagcccgtctgccgtcgccgccgccgcggccgccgtcttccaccaacaacatggcggacaacaaagccctggcctggcagcgctgcagagcggcggcggcgggggcctggagccctacgcggggccccagcagaactctcacgaccacggcttccccaaccaccagtacaactcctactaccccaaccgcagcgcctaccccccgcccgccccggcctacgcgctgagctccccgagaggtggcactccgggctccggcgcggcggcggctgccggctccaagccgcctccctcctccagcgcctccgcctcctcgtcgtcttcgtccttcgctcagcagcgcttcggggccatggggggaggcggcccctccgcggccggcgggggaactccccagcccaccgccacccccaccctcaaccaactgctcacgtcgcccagctcggcccggggctaccagggctaccccgggggcgactacagtggcgggccccaggacgggggcgccggcaagggcccggcggacatggcctcgcagtgttggggggctgcggcggcggcagctgcggcggcggccgcctcgggaggggcccaacaaaggagccaccacgcgcccatgagccccgggagcagcggcggcggggggcagccgctcgcccggacccctcagccatccagtccaatggatcagatgggcaagatgagacctcagccatatggcgggactaacccatactcgcagcaacagggacctccgtcaggaccgcagcaaggacatgggtacccagggcagccatacgggtcccagaccccgcagcggtacccgatgaccatgcagggccgggcgcagagtgccatgggcggcctctcttatacacagcagattcctccttatggacaacaaggccccagcgggtatggtcaacagggccagactccatattacaaccagcaaagtcctcaccctcagcagcagcagccaccctactcccagcaaccaccgtcccagacccctcatgcccaaccttcgtatcagcagcagccacagtctcaaccaccacagctccagtcctctcagcctccatactcccagcagccatcccagcctccacatcagcagtccccggctccatacccctcccagcagtcgacgacacagcagcacccccagagccagcccccctactcacagccacaggctcagtctccttaccagcagcagcaacctcagcagccagcaccctcgacgctctcccagcaggctgcgtatcctcagccccagtctcagcagtcccagcaaactgcctattcccagcagcgcttccctccaccgcaggagctatctcaagattcatttgggtctcaggcatcctcagccccctcaatgacctccagtaagggagggcaagaagatatgaacctgagccttcagtcaagaccctccagcttgcctgatctatctggttcaatagatgacctccccatggggacagaaggagctctgagtcctggagtgagcacatcagggatttccagcagccaaggagagcagagtaatccagctcagtctcctttctctcctcatacctcccctcacctgcctggcatccgaggcccttccccgtcccctgttggctctcccgccagtgttgctcagtctcgctcaggaccactctcgcctgctgcagtgccaggcaaccagatgccacctcggccacccagtggccagtcggacagcatcatgcatccttccatgaaccaatcaagcattgcccaagatcgaggttatatgcagaggaacccccagatgccccagtacagttccccccagcccggctcagccttatctccgcgtcagccttccggaggacagatacacacaggcatgggctcctaccagcagaactccatggggagctatggtccccaggggggtcagtatggcccacaaggtggctaccccaggcagccaaactataatgccttgcccaatgccaactaccccagtgcaggcatggctggaggcataaaccccatgggtgccggaggtcaaatgcatggacagcctggcatcccaccttatggcacactccctccagggaggatgagtcacgcctccatgggcaaccggccttatggccctaacatggccaatatgccacctcaggttgggtcagggatgtgtcccccaccagggggcatgaaccggaaaacccaagaaactgctgtcgccatgcatgttgctgccaactctatccaaaacaggccgccaggctaccccaatatgaatcaagggggcatgatgggaactggacctccttatggacaagggattaatagtatggctggcatgatcaaccctcagggacccccatattccatgggtggaaccatggccaacaattctgcagggatggcagccagcccagagatgatgggccttggggatgtaaagttaactccagccaccaaaatgaacaacaaggcagatgggacacccaagacagaatccaaatccaagaaatccagttcttctactacaaccaatgagaagatcaccaagttgtatgagctgggtggtgagcctgagaggaagatgtgggtggaccgttatctggccttcactgaggagaaggccatgggcatgacaaatctgcctgctgtgggtaggaaacctctggacctctatcgcctctatgtgtctgtgaaggagattggtggattgactcaggtcaacaagaacaaaaaatggcgggaacttgcaaccaacctcaatgtgggcacatcaagcagtgctgccagctccttgaaaaagcagtatatccagtgtctctatgcctttgaatgcaagattgaacggggagaagaccctcccccagacatctttgcagctgctgattccaagaagtcccagcccaagatccagcctccctctcctgcgggatcaggatctatgcaggggccccagactccccagtcaaccagcagttccatggcagaaggaggagacttaaagccaccaactccagcatccacaccacacagtcagatccccccattgccaggcatgagcaggagcaattcagttgggatccaggatgcctttaatgatggaagtgactccacattccagaagcggaattccatgactccaaaccctgggtatcagcccagtatgaatacctctgacatgatggggcgcatgtcctatgagccaaataaggatccttatggcagcatgaggaaagctccagggagtgatcccttcatgtcctcagggcagggccccaacggcgggatgggtgacccctacagtcgtgctgccggccctgggctaggaaatgtggcgatgggaccacgacagcactatccctatggaggtccttatgacagagtgaggacggagcctggaatagggcctgagggaaacatgagcactggggccccacagccgaatctcatgccttccaacccagactcggggatgtattctcctagccgctaccccccgcagcagcagcagcagcagcagcaacgacatgattcctatggcaatcagttctccacccaaggcaccccttctggcagccccttccccagccagcagactacaatgtatcaacagcaacagcagaattacaagcggccaatggatggcacatactggccctcctgccaagcggcacgaaggggagatgtacagcgtgccatacagcactgggcaggggcagcctcagcagcagcagttgcccccagcccagccccagcctgccagccagcaacaagctgcccagccttcccctcagcaagatgtatacaaccagtatggcaatgcctatcctgccactgccacagctgctactgagcgccgaccagcaggcggcccccagaaccaatttccattccagtttggccgagaccgtgtctctgcaccccctggcaccaatgcccagcaaaacatgccaccacaaatgatgggcggccccatacaggcatcagctgaggttgctcagcaaggcaccatgtggcaggggcgtaatgacatgacctataattatgccaacaggcagagcacgggctctgccccccagggccccgcctatcatggcgtgaaccgaacagatgaaatgctgcacacagatcagagggccaaccacgaaggctcgtggccttcccatggcacacgccagcccccatatggtccctctgcccctgtgccccccatgacaaggccccctccatctaactaccagcccccaccaagcatgcagaatcacattcctcaggtatccagccctgctcccctgccccggccaatggagaaccgcacctctcctagcaagtctccattcctgcactctgggatgaaaatgcagaaggcaggtcccccagtacctgcctcgcacatagcacctgcccctgtgcagccccccatgattcggcgggatatcaccttcccacctggctctgttgaagccacacagcctgtgttgaagcagaggaggcggctcacaatgaaagacattggaaccccggaggcatggcgggtaatgatgtccctcaagtctggtctcctggcagagagcacatgggcattagataccatcaacatcctgctgtatgatgacaacagcatcatgaccttcaacctcagtcagctcccagggttgctagagctccttgtagaatatttccgacgatgcctgattgagatctttggcattttaaaggagtatgaggtgggtgacccaggacagagaacgctactggatcctgggaggttcagcaaggtgtctagtccagctcccatggagggtggggaagaagaagaagaacttctaggtcctaaactagaagaggaagaagaagaggaagtagttgaaaatgatgaggagatagccttttcaggcaaggacaagccagcttcagagaatagtgaggagaagctgatcagtaagtttgacaagcttccagtaaagatcgtacagaagaatgatccatttgtggtggactgctcagataagcttgggcgtgtgcaggagtttgacagtggcctgctgcactggcggattggtgggggggacaccactgagcatatccagacccacttcgagagcaagacagagctgctgccttcccggcctcacgcaccctgcccaccagcccctcggaagcatgtgacaacagcagagggtacaccagggacaacagaccaggaggggcccccacctgatggacctccagaaaaacggatcacagccactatggatgacatgttgtctactcggtctagcaccttgaccgaggatggagctaagagttcagaggccatcaaggagagcagcaagtttccatttggcattagcccagcacagagccaccggaacatcaagatcctagaggacgaaccccacagtaaggatgagaccccactgtgtacccttctggactggcaggattctcttgccaagcgctgcgtctgtgtgtccaataccattcgaagcctgtcatttgtgccaggcaatgactttgagatgtccaaacacccagggctgctgctcatcctgggcaagctgatcctgctgcaccacaagcacccagaacggaagcaggcaccactaacttatgaaaaggaggaggaacaggaccaaggggtgagctgcaacaaagtggagtggtggtgggactgcttggagatgctccgggaaaacaccttggttacactcgccaacatctcggggcagttggacctatctccataccccgagagcatttgcctgcctgtcctggacggactcctacactgggcagtttgcccttcagctgaagcccaggaccccttttccaccctgggccccaatgccgtcctttccccgcagagactggtcttggaaaccctcagcaaactcagcatccaggacaacaatgtggacctgattctggccacaccccccttcagccgcctggagaagttgtatagcactatggtgcgcttcctcagtgaccgaaagaacccggtgtgccgggagatggctgtggtactgctggccaacctggctcagggggacagcctggcagctcgtgccattgcagtgcagaagggcagtatcggcaacctcctgggcttcctagaggacagccttgccgccacacagttccagcagagccaggccagcctcctccacatgcagaacccaccctttgagccaactagtgtggacatgatgcggcgggctgcccgcgcgctgcttgccttggccaaggtggacgagaaccactcagagtttactctgtacgaatcacggctgttggacatctcggtatcaccgttgatgaactcattggtttcacaagtcatttgtgatgtactgtttttgattggccagtcatgacagccgtgggacacctcccccccccgtgtgtgtgtgcgtgtgtggagaacttagaaactgactgttgccctttatttatgcaaaaccacctcagaatccagtttaccctgtgctgtccagcttctcccttgggaaaaagtctctcctgtttctctctcctccttccacctcccctccctccatcacctcacgcctttctgttccttgtcctcaccttactcccctcaggaccctaccccaccctctttgaaaagacaaagctctgcctacatagaagactttttttattttaaccaaagttactgttgtttacagtgagtttggggaaaaaaaataaaataaaaatggctttcccagtccttgcatcaacgggatgccacatttcataactgtttttaatggtaaaaaaaaaaaaaaaaaatacaaaaaaaaattctgaaggacaaaaaaggtgactgctgaactgtgtgtggtttattgttgtacattcacaatcttgcaggagccaagaagttcgcagttgtgaacagaccctgttcactggagaggcctgtgcagtagagtgtagaccctttcatgtactgtactgtacacctgatactgtaaacatactgtaataataatgtctcacatggaaacagaaaacgctgggtcagcagcaagctgtagtttttaaaaatgtttttagttaaacgttgaggagaaaaaaaaaaaaggcttttcccccaaagtatcatgtgtgaacctacaacaccctgacctctttctctcctccttgattgtatgaataaccctgagatcacctcttagaactggttttaacctttagctgcagcggctacgctgccacgtgtgtatatatatgacgttgtacattgcacatacccttggatccccacagtttggtcctcctcccagctacccctttatagtatgacgagttaacaagttggtgacctgcacaaagcgagacacagctatttaatctcttgccagatatcgcccctcttggtgcgatgctgtacaggtctctgtaaaaagtccttgctgtctcagcagccaatcaacttatagtttatttttttctgggtttttgttttgttttgttttctttctaatcgaggtgtgaaaaagttctaggttcagttgaagttctgatgaagaaacacaattgagattttttcagtgataaaatctgcatatttgtatttcaacaatgtagctaaaacttgatgtaaattcctcctttttttccttttttggcttaatgaatatcatttattcagtatgaaatctttatactatatgttccacgtgttaagaataaatgtacattaaatcttggtaagacttt

SEQ ID NO: 87 - DNA, 8571 bp, Homo sapiens
cagaaagcggagagtcacagcggggccaggccctggggagcggagcctccaccgcccccctcattcccaggcaagggcttggggggaatgagccgggagagccgggtcccgagcctacagagccgggagcagctgagccgccggcgcctcggccgccgccgccgcctcctcctcctccgccgccgccagcccggagcctgagccggcggggcgggggggagaggagcgagcgcagcgcagcagcggagccccgcgaggcccgcccgggcgggtggggagggcagcccgggggactgggccccggggcggggtgggagggggggagaagacgaagacagggccgggtctctccgcggacgagacagcggggatcatggccgcgcaggtcgcccccgccgccgccagcagcctgggcaacccgccgccgccgccgccctcggagctgaagaaagccgagcagcagcagcgggaggaggcggggggcgaggcggcggcggcggcagcggccgagcgcggggaaatgaaggcagccgccgggcaggaaagcgagggccccgccgtggggccgccgcagccgctgggaaaggagctgcaggacggggccgagagcaatgggggtggcggcggcggcggagccggcagcggcggcgggcccggcgcggagccggacctgaagaactcgaacgggaacgcgggccctaggcccgccctgaacaataacctcacggagccgcccggcggcggcggtggcggcagcagcgatggggtgggggcgcctcctcactcagccgcggccgccttgccgcccccagcctacggcttcgggcaaccctacggccggagcccgtctgccgtcgccgccgccgcggccgccgtcttccaccaacaacatggcggacaacaaagccctggcctggcagcgctgcagagcggcggcggcgggggcctggagccctacgcggggccccagcagaactctcacgaccacggcttccccaaccaccagtacaactcctactaccccaaccgcagcgcctaccccccgcccgccccggcctacgcgctgagctccccgagaggtggcactccgggctccggcgcggcggaagccgcctccctcctccagcgcctccgcctcctcgtcgtcttcgtccttcgctcagcagcgcttcggggccatggggggaggcggcccctccgcggccggcgggggaactccccagcccaccgccacccccaccctcaaccaactgctcacgtcgcccagctcggcccggggctaccagggctaccccgggggcgactacagtggcgggccccaggacgggggcgccggcaagggcccggcggacatggcctcgcagtgttggggggctgcggcggcggcagctgcggcggcggccgcctcgggaggggcccaacaaaggagccaccacgcgcccatgagccccgggagcagcggcggcggggggcagccgctcgcccggacccctcagccatccagtccaatggatcagatgggcaagatgagacctcagccatatggcgggactaacccatactcgcagcaacagggacctccgtcaggaccgcagcaaggacatgggtacccagggcagccatacgggtcccagaccccgcagcggtacccgatgaccatgcagggccgggcgcagagtgccatgggcggcctctcttatacacagcagattcctccttatggacaacaaggccccagcgggtatggtcaacagggccagactccatattacaaccagcaaagtcctcaccctcagcagcagcagccaccctactcccagcaaccaccgtcccagacccctcatgcccaaccttcgtatcagcagcagccacagtctcaaccaccacagctccagtcctctcagcctccatactcccagcagccatcccagcctccacatcagcagtccccggctccatacccctcccagcagtcgacgacacagcagcacccccagagccagcccccctactcacagccacaggctcagtctccttaccagcagcagcaacctcagcagccagcaccctcgacgctctcccagcaggctgcgtatcctcagccccagtctcagcagtcccagcaaactgcctattcccagcagcgcttccctccaccgcaggagctatctcaagattcatttgggtctcaggcatcctcagccccctcaatgacctccagtaagggagggcaagaagatatgaacctgagccttcagtcaagaccctccagcttgcctgatctatctggttcaatagatgacctccccatggggacagaaggagctctgagtcctggagtgagcacatcagggatttccagcagccaaggagagcagagtaatccagctcagtctcctttctctcctcatacctcccctcacctgcctggcatccgaggcccttccccgtcccctgttggctctcccgccagtgttgctcagtctcgctcaggaccactctcgcctgctgcagtgccaggcaaccagatgccacctcggccacccagtggccagtcggacagcatcatgcatccttccatgaaccaatcaagcattgcccaagatcgaggttatatgcagaggaacccccagatgccccagtacagttccccccagcccggctcagccttatctccgcgtcagccttccggaggacagatacacacaggcatgggctcctaccagcagaactccatggggagctatggtccccaggggggtcagtatggcccacaaggtggctaccccaggcagccaaactataatgccttgcccaatgccaactaccccagtgcaggcatggctggaggcataaaccccatgggtgccggaggtcaaatgcatggacagcctggcatcccaccttatggcacactccctccagggaggatgagtcacgcctccatgggcaaccggccttatggccctaacatggccaatatgccacctcaggttgggtcagggatgtgtcccccaccagggggcatgaaccggaaaacccaagaaactgctgtcgccatgcatgttgctgccaactctatccaaaacaggccgccaggctaccccaatatgaatcaagggggcatgatgggaactggacctccttatggacaagggattaatagtatggctggcatgatcaaccctcagggacccccatattccatgggtggaaccatggccaacaattctgcagggatggcagccagcccagagatgatgggccttggggatgtaaagttaactccagccaccaaaatgaacaacaaggcagatgggacacccaagacagaatccaaatccaagaaatccagttcttctactacaaccaatgagaagatcaccaagttgtatgagctgggtggtgagcctgagaggaagatgtgggtggaccgttatctggccttcactgaggagaaggccatgggcatgacaaatctgcctgctgtgggtaggaaacctctggacctctatcgcctctatgtgtctgtgaaggagattggtggattgactcaggtcaacaagaacaaaaaatggcgggaacttgcaaccaacctcaatgtgggcacatcaagcagtgctgccagctccttgaaaaagcagtatatccagtgtctctatgcctttgaatgcaagattgaacggggagaagaccctcccccagacatctttgcagctgctgattccaagaagtcccagcccaagatccagcctccctctcctgcgggatcaggatctatgcaggggccccagactccccagtcaaccagcagttccatggcagaaggaggagacttaaagccaccaactccagcatccacaccacacagtcagatccccccattgccaggcatgagcaggagcaattcagttgggatccaggatgcctttaatgatggaagtgactccacattccagaagcggaattccatgactccaaaccctgggtatcagcccagtatgaatacctctgacatgatggggcgcatgtcctatgagccaaataaggatccttatggcagcatgaggaaagctccagggagtgatcccttcatgtcctcagggcagggccccaacggcgggatgggtgacccctacagtcgtgctgccggccctgggctaggaaatgtggcgatgggaccacgacagcactatccctatggaggtccttatgacagagtgaggacggagcctggaatagggcctgagggaaacatgagcactggggccccacagccgaatctcatgccttccaacccagactcggggatgtattctcctagccgctaccccccgcagcagcagcagcagcagcagcaacgacatgattcctatggcaatcagttctccacccaaggcaccccttctggcagccccttccccagccagcagactacaatgtatcaacagcaacagcagaattacaagcggccaatggatggcacatatggccctcctgccaagcggcacgaaggggagatgtacagcgtgccatacagcactgggcaggggcagcctcagcagcagcagttgcccccagcccagccccagcctgccagccagcaacaagctgcccagccttcccctcagcaagatgtatacaaccagtatggcaatgcctatcctgccactgccacagctgctactgagcgccgaccagcaggcggcccccagaaccaatttccattccagtttggccgagaccgtgtctctgcaccccctggcaccaatgcccagcaaaacatgccaccacaaatgatgggcggccccatacaggcatcagctgaggttgctcagcaaggcaccatgtggcaggggcgtaatgacatgacctataattatgccaacaggcagagcacgggctctgccccccagggccccgcctatcatggcgtgaaccgaacagatgaaatgctgcacacagatcagagggccaaccacgaaggctcgtggccttcccatggcacacgccagcccccatatggtccctctgcccctgtgccccccatgacaaggccccctccatctaactaccagcccccaccaagcatgcagaatcacattcctcaggtatccagccctgctcccctgccccggccaatggagaaccgcacctctcctagcaagtctccattcctgcactctgggatgaaaatgcagaaggcaggtcccccagtacctgcctcgcacatagcacctgcccctgtgcagccccccatgattcggcgggatatcaccttcccacctggctctgttgaagccacacagcctgtgttgaagcagaggaggcggctcacaatgaaagacattggaaccccggaggcatggcgggtaatgatgtccctcaagtctggtctcctggcagagagcacatgggcattagataccatcaacatcctgctgtatgatgacaacagcatcatgaccttcaacctcagtcagctcccagggttgctagagctccttgtagaatatttccgacgatgcctgattgagatctttggcattttaaaggagtatgaggtgggtgacccaggacagagaacgctactggatcctgggaggttcagcaaggtgtctagtccagctcccatggagggtggggaagaagaagaagaacttctaggtcctaaactagaagaggaagaagaagaggaagtagttgaaaatgatgaggagatagccttttcaggcaaggacaagccagcttcagagaatagtgaggagaagctgatcagtaagtttgacaagcttccagtaaagatcgtacagaagaatgatccatttgtggtggactgctcagataagcttgggcgtgtgcaggagtttgacagtggcctgctgcactggcggattggtgggggggacaccactgagcatatccagacccacttcgagagcaagacagagctgctgccttcccggcctcacgcaccctgcccaccagcccctcggaagcatgtgacaacagcagagggtacaccagggacaacagaccaggaggggcccccacctgatggacctccagaaaaacggatcacagccactatggatgacatgttgtctactcggtctagcaccttgaccgaggatggagctaagagttcagaggccatcaaggagagcagcaagtttccatttggcattagcccagcacagagccaccggaacatcaagatcctagaggacgaaccccacagtaaggatgagaccccactgtgtacccttctggactggcaggattctcttgccaagcgctgcgtctgtgtgtccaataccattcgaagcctgtcatttgtgccaggcaatgactttgagatgtccaaacacccagggctgctgctcatcctgggcaagctgatcctgctgcaccacaagcacccagaacggaagcaggcaccactaacttatgaaaaggaggaggaacaggaccaaggggtgagctgcaacaaagtggagtggtggtgggactgcttggagatgctccgggaaaacaccttggttacactcgccaacatctcggggcagttggacctatctccataccccgagagcatttgcctgcctgtcctggacggactcctacactgggcagtttgcccttcagctgaagcccaggaccccttttccaccctgggccccaatgccgtcctttccccgcagagactggtcttggaaaccctcagcaaactcagcatccaggacaacaatgtggacctgattctggccacaccccccttcagccgcctggagaagttgtatagcactatggtgcgcttcctcagtgaccgaaagaacccggtgtgccgggagatggctgtggtactgctggccaacctggctcagggggacagcctggcagctcgtgccattgcagtgcagaagggcagtatcggcaacctcctgggcttcctagaggacagccttgccgccacacagttccagcagagccaggccagcctcctccacatgcagaacccaccctttgagccaactagtgtggacatgatgcggcgggctgcccgcgcgctgcttgccttggccaaggtggacgagaaccactcagagtttactctgtacgaatcacggctgttggacatctcggtatcaccgttgatgaactcattggtttcacaagtcatttgtgatgtactgtttttgattggccagtcatgacagccgtgggacacctcccccccccgtgtgtgtgtgcgtgtgtggagaacttagaaactgactgttgccctttatttatgcaaaaccacctcagaatccagtttaccctgtgctgtccagcttctcccttgggaaaaagtctctcctgtttctctctcctccttccacctcccctccctccatcacctcacgcctttctgttccttgtcctcaccttactcccctcaggaccctaccccaccctctttgaaaagacaaagctctgcctacatagaagactttttttattttaaccaaagttactgttgtttacagtgagtttggggaaaaaaaataaaataaaaatggctttcccagtccttgcatcaacgggatgccacatttcataactgtttttaatggtaaaaaaaaaaaaaaaaaatacaaaaaaaaattctgaaggacaaaaaaggtgactgctgaactgtgtgtggtttattgttgtacattcacaatcttgcaggagccaagaagttcgcagttgtgaacagaccctgttcactggagaggcctgtgcagtagagtgtagaccctttcatgtactgtactgtacacctgatactgtaaacatactgtaataataatgtctcacatggaaacagaaaacgctgggtcagcagcaagctgtagtttttaaaaatgtttttagttaaacgttgaggagaaaaaaaaaaaaggcttttcccccaaagtatcatgtgtgaacctacaacaccctgacctctttctctcctccttgattgtatgaataaccctgagatcacctcttagaactggttttaacctttagctgcagcggctacgctgccacgtgtgtatatatatgacgttgtacattgcacatacccttggatccccacagtttggtcctcctcccagctacccctttatagtatgacgagttaacaagttggtgacctgcacaaagcgagacacagctatttaatctcttgccagatatcgcccctcttggtgcgatgctgtacaggtctctgtaaaaagtccttgctgtctcagcagccaatcaacttatagtttatttttttctgggtttttgttttgttttgttttctttctaatcgaggtgtgaaaaagttctaggttcagttgaagttctgatgaagaaacacaattgagattttttcagtgataaaatctgcatatttgtatttcaacaatgtagctaaaacttgatgtaaattcctcctttttttccttttttggcttaatgaatatcatttattcagtatgaaatctttatactatatgttccacgtgttaagaataaatgtacattaaatcttggtaagacttt

SEQ ID NO: 88 - DNA, 8584 bp, Homo sapiens
cagaaagcggagagtcacagcggggccaggccctggggagcggagcctccaccgcccccctcattcccaggcaagggcttggggggaatgagccgggagagccgggtcccgagcctacagagccgggagcagctgagccgccggcgcctcggccgccgccgccgcctcctcctcctccgccgccgccagcccggagcctgagccggcggggcgggggggagaggagcgagcgcagcgcagcagcggagccccgcgaggcccgcccgggcgggtggggagggcagcccgggggactgggccccggggcggggtgggagggggggagaagacgaagacagggccgggtctctccgcggacgagacagcggggatcatggccgcgcaggtcgcccccgccgccgccagcagcctgggcaacccgccgccgccgccgccctcggagctgaagaaagccgagcagcagcagcgggaggaggcggggggcgaggcggcggcggcggcagcggccgagcgcggggaaatgaaggcagccgccgggcaggaaagcgagggccccgccgtggggccgccgcagccgctgggaaaggagctgcaggacggggccgagagcaatgggggtggcggcggcggcggagccggcagcggcggcgggcccggcgcggagccggacctgaagaactcgaacgggaacgcgggccctaggcccgccctgaacaataacctcacggagccgcccggcggcggcggtggcggcagcagcgatggggtgggggcgcctcctcactcagccgcggccgccttgccgcccccagcctacggcttcgggcaaccctacggccggagcccgtctgccgtcgccgccgccgcggccgccgtcttccaccaacaacatggcggacaacaaagccctggcctggcagcgctgcagagcggcggcggcgggggcctggagccctacgcggggccccagcagaactctcacgaccacggcttccccaaccaccagtacaactcctactaccccaaccgcagcgcctaccccccgcccgccccggcctacgcgctgagctccccgagaggtggcactccgggctccggcgcggcggcggctgccggctccaagccgcctccctcctccagcgcctccgcctcctcgtcgtcttcgtccttcgctcagcagcgcttcggggccatggggggaggcggcccctccgcggccggcgggggaactccccagcccaccgccacccccaccctcaaccaactgctcacgtcgcccagctcggcccggggctaccagggctaccccgggggcgactacagtggcgggccccaggacgggggcgccggcaagggcccggcggacatggcctcgcagtttggggggctgcggcggcggcagctgcggcggcggccgcctcgggaggggcccaacaaaggagccaccacgcgcccatgagccccgggagcagcggcggcggggggcagccgctcgcccggacccctcagccatccagtccaatggatcagatgggcaagatgagacctcagccatatggcgggactaacccatactcgcagcaacagggacctccgtcaggaccgcagcaaggacatgggtacccagggcagccatacgggtcccagaccccgcagcggtacccgatgaccatgcagggccgggcgcagagtgccatgggcggcctctcttatacacagcagattcctccttatggacaacaaggccccagcgggtatggtcaacagggccagactccatattacaaccagcaaagtcctcaccctcagcagcagcagccaccctactcccagcaaccaccgtcccagacccctcatgcccaaccttcgtatcagcagcagccacagtctcaaccaccacagctccagtcctctcagcctccatactcccagcagccatcccagcctccacatcagcagtccccggctccatacccctcccagcagtcgacgacacagcagcacccccagagccagcccccctactcacagccacaggctcagtctccttaccagcagcagcaacctcagcagccagcaccctcgacgctctcccagcaggctgcgtatcctcagccccagtctcagcagtcccagcaaactgcctattcccagcagcgcttccctccaccgcaggagctatctcaagattcatttgggtctcaggcatcctcagccccctcaatgacctccagtaagggagggcaagaagatatgaacctgagccttcagtcaagaccctccagcttgcctgatctatctggttcaatagatgacctccccatggggacagaaggagctctgagtcctggagtgagcacatcagggatttccagcagccaaggagagcagagtaatccagctcagtctcctttctctcctcatacctcccctcacctgcctggcatccgaggcccttccccgtcccctgttggctctcccgccagtgttgctcagtctcgctcaggaccactctcgcctgctgcagtgccaggcaaccagatgccacctcggccacccagtggccagtcggacagcatcatgcatccttccatgaaccaatcaagcattgcccaagatcgaggttatatgcagaggaacccccagatgccccagtacagttccccccagcccggctcagccttatctccgcgtcagccttccggaggacagatacacacaggcatgggctcctaccagcagaactccatggggagctatggtccccaggggggtcagtatggcccacaaggtggctaccccaggcagccaaactataatgccttgcccaatgccaactaccccagtgcaggcatggctggaggcataaaccccatgggtgccggaggtcaaatgcatggacagcctggcatcccaccttatggcacactccctccagggaggatgagtcacgcctccatgggcaaccggccttatggccctaacatggccaatatgccacctcaggttgggtcagggatgtgtcccccaccagggggcatgaaccggaaaacccaagaaactgctgtcgccatgcatgttgctgccaactctatccaaaacaggccgccaggctaccccaatatgaatcaagggggcatgatgggaactggacctccttatggacaagggattaatagtatggctggcatgatcaaccctcagggacccccatattccatgggtggaaccatggccaacaattctgcagggatggcagccagcccagagatgatgggccttggggatgtaaagttaactccagccaccaaaatgaacaacaaggcagatgggacacccaagacagaatccaaatccaagaaatccagttcttctactacaaccaatgagaagatcaccaagttgtatgagctgggtggtgagcctgagaggaagatgtgggtggaccgttatctggccttcactgaggagaaggccatgggcatgacaaatctgcctgctgtgggtaggaaacctctggacctctatcgcctctatgtgtctgtgaaggagattggtggattgactcaggtcaacaagaacaaaaaatggcgggaacttgcaaccaacctcaatgtgggcacatcaagcagtgctgccagctccttgaaaaagcagtatatccagtgtctctatgcctttgaatgcaagattgaacggggagaagaccctcccccagacatctttgcagctgctgattccaagaagtcccagcccaagatccagcctccctctcctgcgggatcaggatctatgcaggggccccagactccccagtcaaccagcagttccatggcagaaggaggagacttaaagccaccaactccagcatccacaccacacagtcagatccccccattgccaggcatgagcaggagcaattcagttgggatccaggatgcctttaatgatggaagtgactccacattccagaagcggaattccatgactccaaaccctgggtatcagcccagtatgaatacctctgacatgatggggcgcatgtcctatgagccaaataaggatccttatggcagcatgaggaaagctccagggagtgatcccttcatgtcctcagggcagggccccaacggcgggatgggtgacccctacagtcgtgctgccggccctgggctaggaaatgtggcgatgggaccacgacagcactatccctatggaggtccttatgacagagtgaggacggagcctggaatagggcctgagggaaacatgagcactggggccccacagccgaatctcatgccttccaacccagactcggggatgtattctcctagccgctaccccccgcagcagcagcagcagcagcagcaacgacatgattcctatggcaatcagttctccacccaaggcaccccttctggcagccccttccccagccagcagactacaatgtatcaacagcaacagcagaattacaagcggccaatggatggcacatatggccctcctgccaagcggcacgaaggggagatgtacagcgtgccatacagcactgggcaggggcagcctcagcagcagcagttgcccccagcccagccccagcctgccagccagcaacaagctgcccagccttcccctcagcaagatgtatacaaccagtatggcaatgcctatcctgccactgccacagctgctactgagcgccgaccagcaggcggcccccagaaccaatttccattccagtttggccgagaccgtgtctctgcaccccctggcaccaatgcccagcaaaacatgccaccacaaatgatgggcggccccatacaggcatcagctgaggttgctcagcaaggcaccatgtggcaggggcgtaatgacatgacctataattatgccaacaggcagagcacgggctctgccccccagggccccgcctatcatggcgtgaaccgaacagatgaaatgctgcacacagatcagagggccaaccacgaaggctcgtggccttcccatggcacacgccagcccccatatggtccctctgcccctgtgccccccatgacaaggccccctccatctaactaccagcccccaccaagcatgcagaatcacattcctcaggtatccagccctgctcccctgccccggccaatggagaaccgcacctctcctagcaagtctccattcctgcactctgggatgaaaatgcagaaggcaggtcccccagtacctgcctcgcacatagcacctgcccctgtgcagccccccatgattcggcgggatatcaccttcccacctggctctgttgaagccacacagcctgtgttgaagcagaggaggcggctcacaatgaaagacattggaaccccggaggcatggcgggtaatgatgtccctcaagtctggtctcctggcagagagcacatgggcattagataccatcaacatcctgctgtatgatgacaacagcatcatgaccttcaacctcagtcagctcccagggttgctagagctccttgtagaatatttccgacgatgcctgattgagatctttggcattttaaaggagtatgaggtgggtgacccaggacagagaacgctactggatcctgggaggttcagcaaggtgtctagtccagctcccatggagggtggggaagaagaagaagaacttctaggtcctaaactagaagaggaagaagaagaggaagtagttgaaaatgatgaggagatagccttttcaggcaaggacaagccagcttcagagaatagtgaggagaagctgatcagtaagtttgacaagcttccagtaaagatcgtacagaagaatgatccatttgtggtggactgctcagataagcttgggcgtgtgcaggagtttgacagtggcctgctgcactggcggattggtgggggggacaccactgagcatatccagacccacttcgagagcaagacagagctgctgccttcccggcctcacgcaccctgcccaccagcccctcggaagcatgtgacaacagcagagggtacaccagggacaacagaccaggaggggcccccacctgatggacctccagaaaaacggatcacagccactatggatgacatgttgtctactcggtctagcaccttgaccgaggatggagctaagagttcagaggccatcaaggagagcagcaagtttccatttggcattagcccagcacagagccaccggaacatcaagatcctagaggacgaaccccacagtaaggatgagaccccactgtgtacccttctggactggcaggattctcttgccaagcgctgcgtctgtgtgtccaataccattcgaagcctgtcatttgtgccaggcaatgactttgagatgtccaaacacccagggctgctgctcatcctgggcaagctgatcctgctgcaccacaagcacccagaacggaagcaggcaccactaacttatgaaaaggaggaggaacaggaccaaggggtgagctgcaacaaagtggagtggtggtgggactgcttggagatgctccgggaaaacaccttggttacactcgccaacatctcggggcagttggacctatctccataccccgagagcatttgcctgcctgtcctggacggactcctacactgggcagtttgcccttcagctgaagcccaggaccccttttccaccctgggccccaatgccgtcctttccccgcagagactggtcttggaaaccctcagcaaactcagcatccaggacaacaatgtggacctgattctggccacaccccccttcagccgcctggagaagttgtatagcactatggtgcgcttcctcagtgaccgaaagaacccggtgtgccgggagatggctgtggtactgctggccaacctggctcagggggacagcctggcagctcgtgccattgcagtgcagaagggcagtatcggcaacctcctgggcttcctagaggacagccttgccgccacacagttccagcagagccaggccagcctcctccacatgcagaacccaccctttgagccaactagtgtggacatgatgcggcgggctgcccgcgcgctgcttgccttggccaaggtggacgagaaccactcagagtttactctgtacgaatcacggctgttggacatctcggtatcaccgttgatgaactcattggtttcacaagtcatttgtgatgtactgtttttgattggccagtcatgacagccgtgggacacctcccccccccgtgtgtgtgtgcgtgtgtggagaacttagaaactgactgttgccctttatttatgcaaaaccacctcagaatccagtttaccctgtgctgtccagcttctcccttgggaaaaagtctctcctgtttctctctcctccttccacctcccctccctccatcacctcacgcctttctgttccttgtcctcaccttactcccctcaggaccctaccccaccctctttgaaaagacaaagctctgcctacatagaagactttttttattttaaccaaagttactgttgtttacagtgagtttggggaaaaaaaataaaataaaaatggctttcccagtccttgcatcaacgggatgccacatttcataactgtttttaatggtaaaaaaaaaaaaaaaaaatacaaaaaaaaattctgaaggacaaaaaaggtgactgctgaactgtgtgtggtttattgttgtacattcacaatcttgcaggagccaagaagttcgcagttgtgaacagaccctgttcactggagaggcctgtgcagtagagtgtagaccctttcatgtactgtactgtacacctgatactgtaaacatactgtaataataatgtctcacatggaaacagaaaacgctgggtcagcagcaagctgtagtttttaaaaatgtttttagttaaacgttgaggagaaaaaaaaaaaaggcttttcccccaaagtatcatgtgtgaacctacaacaccctgacctctttctctcctccttgattgtatgaataaccctgagatcacctcttagaactggttttaacctttagctgcagcggctacgctgccacgtgtgtatatatatgacgttgtacattgcacatacccttggatccccacagtttggtcctcctcccagctacccctttatagtatgacgagttaacaagttggtgacctgcacaaagcgagacacagctatttaatctcttgccagatatcgcccctcttggtgcgatgctgtacaggtctctgtaaaaagtccttgctgtctcagcagccaatcaacttatagtttatttttttctgggtttttgttttgttttgttttctttctaatcgaggtgtgaaaaagttctaggttcagttgaagttctgatgaagaaacacaattgagattttttcagtgataaaatctgcatatttgtatttcaacaatgtagctaaaacttgatgtaaattcctcctttttttccttttttggcttaatgaatatcatttattcagtatgaaatctttatactatatgttccacgtgttaagaataaatgtacattaaatcttggtaagacttt

SEQ ID NO: 89 - DNA, 8560 bp, Homo sapiens
cagaaagcggagagtcacagcggggccaggccctggggagcggagcctccaccgcccccctcattcccaggcaagggcttggggggaatgagccgggagagccgggtcccgagcctacagagccgggagcagctgagccgccggcgcctcggccgccgccgccgcctcctcctcctccgccgccgccagcccggagcctgagccggcggggcgggggggagaggagcgagcgcagcgcagcagcggagccccgcgaggcccgcccgggcgggtggggagggcagcccgggggactgggccccggggcggggtgggagggggggagaagacgaagacagggccgggtctctccgcggacgagacagcggggatcatggccgcgcaggtcgcccccgccgccgccagcagcctgggcaacccgccgccgccgccgccctcggagctgaagaaagccgagcagcagcagcgggaggaggcggggggcgaggcggcggcggcggcagcggccgagcgcggggaaatgaaggcagccgccgggcaggaaagcgagggccccgccgtggggccgccgcagccgctgggaaaggagctgcaggacggggccgagagcaatgggggtggcggcggcggcggagccggcagcggcggcgggcccggcgcggagccggacctgaagaactcgaacgggaacgcgggccctaggcccgccctgaacaataacctcacggagccgcccggcggcggcggtggcggcagcagcgatggggtgggggcgcctcctcactcagccgcggccgccttgccgcccccagcctacggcttcgggcaaccctacggccggagcccgtctgccgtcgccgccgccgcggccgccgtcttccaccaacaacatggcggacaacaaagccctggcctggcagcgctgcagagcggcggcggcgggggcctggagccctacgcggggccccagcagaactctcacgaccacggcttccccaaccaccagtacaactcctactaccccaaccgcagcgcctaccccccgcccgccccggcctacgcgctgagctccccgagaggtggcactccgggctccggcgcggcggcggctgccggctccaagccgcctccctcctccagcgcctccgcctcctcgtcgtcttcgtccttcgctcagcagcgcttcggggccatggggggaggcggcccctccgcggccggcgggggaactccccagcccaccgccacccccaccctcaaccaactgctcacgtcgcccagctcggcccggggctaccagggctaccccgggggcgactacagtggcgggccccaggacgggggcgccggcaagggcccggcggacatggcctcgcagtgttggggggctgcggcggcggcagctgcggcggcggccgcctcgggaggggcccaacaaaggagccaccacgcgcccatgagccccgggagcagcggcggcggggggcagccgctcgcccggacccctcagccatccagtccaatggatcagatgggcaagatgagacctcagccatatggcgggactaacccatactcgcagcaacagggacctccgtcaggaccgcagcaaggacatgggtacccagggcagccatacgggtcccagaccccgcagcggtacccgatgaccatgcagggccgggcgcagagtgccatgggcggcctctcttatacacagcagattcctccttatggacaacaaggccccagcgggtatggtcaacagggccagactccatattacaaccagcaaagtcctcaccctcagcagcagcagccaccctactcccagcaaccaccgtcccagacccctcatgcccaaccttcgtatcagcagcagccacagtctcaaccaccacagctccagtcctctcagcctccatactcccagcagccatcccagcctccacatcagcagtccccggctccatacccctcccagcagtcgacgacacagcagcacccccagagccagcccccctactcacagccacaggctcagtctccttaccagcagcagcaacctcagcagccagcaccctcgacgctctcccagcaggctgcgtatcctcagccccagtctcagcagtcccagcaaactgcctattcccagcagcgcttccctccaccgcaggagctatctcaagattcatttgggtctcaggcatcctcagccccctcaatgacctccagtaagggagggcaagaagatatgaacctgagccttcagtcaagaccctccagcttgcctgatctatctggttcaatagatgacctccccatggggacagaaggagctctgagtcctggagtgagcacatcagggatttccagcagccaaggagagcagagtaatccagctcagtctcctttctctcctcatacctcccctcacctgcctggcatccgaggcccttccccgtcccctgttggctctcccgccagtgttgctcagtctcgctcaggaccactctcgcctgctgcagtgccaggcaaccagatgccacctcggccacccagtggccagtcggacagcatcatgcatccttccatgaaccaatcaagcattgcccaagatcgaggttatatgcagaggaacccccagatgccccagtacagttccccccagcccggctcagccttatctccgcgtcagccttccggaggacagatacacacaggcatgggctcctaccagcagaactccatggggagctatggtccccaggggggtcagtatggcccacaaggtggctaccccaggcagccaaactataatgccttgcccaatgccaactaccccagtgcaggcatggctggaggcataaaccccatgggtgccggaggtcaaatgcatggacagcctggcatcccaccttatggcacactccctccagggaggatgagtcacgcctccatgggcaaccggccttatggccctaacatggccaatatgccacctcaggttgggtcagggatgtgtcccccaccagggggcatgaaccggaaaacccaagaaactgctgtcgccatgcatgttgctgccaactctatccaaaacaggccgccaggctaccccaatatgaatcaagggggcatgatgggaactggacctccttatggacaagggattaatagtatggctggcatgatcaaccctcagggacccccatattccatgggtggaaccatggccaacaattctgcagggatggcagccagcccagagatgatgggccttggggatgtaaagttaactccagccaccaaaatgaacaacaaggcagatgggacacccaagacagaatccaaatccaagaaatccagttcttctactacaaccaatgagaagatcaccaagttgtatgagctgggtggtgagcctgagaggaagatgtgggtggaccgttatctggccttcactgaggagaaggccatgggcatgacaaatctgcctgctgtgggtaggaaacctctggacctctatcgcctctatgtgtctgtgaaggagattggtggattgactcaggtcaacaagaacaaaaaatggcgggaacttgcaaccaacctcaatgtgggcacatcaagcagtgctgccagctccttgaaaaagcagtatatccagtgtctctatgcctttgaatgcaagattgaacggggagaagaccctcccccagacatctttgcagctgctgattccaagaagtcccagcccaagatccagcctccctctcctgcgggatcaggatctatgcaggggccccagactccccagtcaaccagcagttccatggcagaaggaggagacttaaagccaccaactccagcatccacaccacacagtcagatccccccattgccaggcatgagcaggagcaattcagttgggatccaggatgcctttaatgatggaagtgactccacattccagaagcggaattccatgactccaaaccctgggtatcagcccagtatgaatacctctgacataataaggatccttatggcagcatgaggaaagctccagggagtgatcccttcatgtcctcagggcagggccccaacggcgggatgggtgacccctacagtcgtgctgccggccctgggctaggaaatgtggcgatgggaccacgacagcactatccctatggaggtccttatgacagagtgaggacggagcctggaatagggcctgagggaaacatgagcactggggccccacagccgaatctcatgccttccaacccagactcggggatgtattctcctagccgctaccccccgcagcagcagcagcagcagcagcaacgacatgattcctatggcaatcagttctccacccaaggcaccccttctggcagccccttccccagccagcagactacaatgtatcaacagcaacagcagaattacaagcggccaatggatggcacatatggccctcctgccaagcggcacgaaggggagatgtacagcgtgccatacagcactgggcaggggcagcctcagcagcagcagttgcccccagcccagccccagcctgccagccagcaacaagctgcccagccttcccctcagcaagatgtatacaaccagtatggcaatgcctatcctgccactgccacagctgctactgagcgccgaccagcaggcggcccccagaaccaatttccattccagtttggccgagaccgtgtctctgcaccccctggcaccaatgcccagcaaaacatgccaccacaaatgatgggcggccccatacaggcatcagctgaggttgctcagcaaggcaccatgtggcaggggcgtaatgacatgacctataattatgccaacaggcagagcacgggctctgccccccagggccccgcctatcatggcgtgaaccgaacagatgaaatgctgcacacagatcagagggccaaccacgaaggctcgtggccttcccatggcacacgccagcccccatatggtccctctgcccctgtgccccccatgacaaggccccctccatctaactaccagcccccaccaagcatgcagaatcacattcctcaggtatccagccctgctcccctgccccggccaatggagaaccgcacctctcctagcaagtctccattcctgcactctgggatgaaaatgcagaaggcaggtcccccagtacctgcctcgcacatagcacctgcccctgtgcagccccccatgattcggcgggatatcaccttcccacctggctctgttgaagccacacagcctgtgttgaagcagaggaggcggctcacaatgaaagacattggaaccccggaggcatggcgggtaatgatgtccctcaagtctggtctcctggcagagagcacatgggcattagataccatcaacatcctgctgtatgatgacaacagcatcatgaccttcaacctcagtcagctcccagggttgctagagctccttgtagaatatttccgacgatgcctgattgagatctttggcattttaaaggagtatgaggtgggtgacccaggacagagaacgctactggatcctgggaggttcagcaaggtgtctagtccagctcccatggagggtggggaagaagaagaagaacttctaggtcctaaactagaagaggaagaagaagaggaagtagttgaaaatgatgaggagatagccttttcaggcaaggacaagccagcttcagagaatagtgaggagaagctgatcagtaagtttgacaagcttccagtaaagatcgtacagaagaatgatccatttgtggtggactgctcagataagcttgggcgtgtgcaggagtttgacagtggcctgctgcactggcggattggtgggggggacaccactgagcatatccagacccacttcgagagcaagacagagctgctgccttcccggcctcacgcaccctgcccaccagcccctcggaagcatgtgacaacagcagagggtacaccagggacaacagaccaggaggggcccccacctgatggacctccagaaaaacggatcacagccactatggatgacatgttgtctactcggtctagcaccttgaccgaggatggagctaagagttcagaggccatcaaggagagcagcaagtttccatttggcattagcccagcacagagccaccggaacatcaagatcctagaggacgaaccccacagtaaggatgagaccccactgtgtacccttctggactggcaggattctcttgccaagcgctgcgtctgtgtgtccaataccattcgaagcctgtcatttgtgccaggcaatgactttgagatgtccaaacacccagggctgctgctcatcctgggcaagctgatcctgctgcaccacaagcacccagaacggaagcaggcaccactaacttatgaaaaggaggaggaacaggaccaaggggtgagctgcaacaaagtggagtggtggtgggactgcttggagatgctccgggaaaacaccttggttacactcgccaacatctcggggcagttggacctatctccataccccgagagcatttgcctgcctgtcctggacggactcctacactgggcagtttgcccttcagctgaagcccaggaccccttttccaccctgggccccaatgccgtcctttccccgcagagactggtcttggaaaccctcagcaaactcagcatccaggacaacaatgtggacctgattctggccacaccccccttcagccgcctggagaagttgtatagcactatggtgcgcttcctcagtgaccgaaagaacccggtgtgccgggagatggctgtggtactgctggccaacctggctcagggggacagcctggcagctcgtgccattgcagtgcagaagggcagtatcggcaacctcctgggcttcctagaggacagccttgccgccacacagttccagcagagccaggccagcctcctccacatgcagaacccaccctttgagccaactagtgtggacatgatgcggcgggctgcccgcgcgctgcttgccttggccaaggtggacgagaaccactcagagtttactctgtacgaatcacggctgttggacatctcggtatcaccgttgatgaactcattggtttcacaagtcatttgtgatgtactgtttttgattggccagtcatgacagccgtgggacacctcccccccccgtgtgtgtgtgcgtgtgtggagaacttagaaactgactgttgccctttatttatgcaaaaccacctcagaatccagtttaccctgtgctgtccagcttctcccttgggaaaaagtctctcctgtttctctctcctccttccacctcccctccctccatcacctcacgcctttctgttccttgtcctcaccttactcccctcaggaccctaccccaccctctttgaaaagacaaagctctgcctacatagaagactttttttattttaaccaaagttactgttgtttacagtgagtttggggaaaaaaaataaaataaaaatggctttcccagtccttgcatcaacgggatgccacatttcataactgtttttaatggtaaaaaaaaaaaaaaaaaatacaaaaaaaaattctgaaggacaaaaaaggtgactgctgaactgtgtgtggtttattgttgtacattcacaatcttgcaggagccaagaagttcgcagttgtgaacagaccctgttcactggagaggcctgtgcagtagagtgtagaccctttcatgtactgtactgtacacctgatactgtaaacatactgtaataataatgtctcacatggaaacagaaaacgctgggtcagcagcaagctgtagtttttaaaaatgtttttagttaaacgttgaggagaaaaaaaaaaaaggcttttcccccaaagtatcatgtgtgaacctacaacaccctgacctctttctctcctccttgattgtatgaataaccctgagatcacctcttagaactggttttaacctttagctgcagcggctacgctgccacgtgtgtatatatatgacgttgtacattgcacatacccttggatccccacagtttggtcctcctcccagctacccctttatagtatgacgagttaacaagttggtgacctgcacaaagcgagacacagctatttaatctcttgccagatatcgcccctcttggtgcgatgctgtacaggtctctgtaaaaagtccttgctgtctcagcagccaatcaacttatagtttatttttttctgggtttttgttttgttttgttttctttctaatcgaggtgtgaaaaagttctaggttcagttgaagttctgatgaagaaacacaattgagattttttcagtgataaaatctgcatatttgtatttcaacaatgtagctaaaacttgatgtaaattcctcctttttttccttttttggcttaatgaatatcatttattcagtatgaaatctttatactatatgttccacgtgttaagaataaatgtacattaaatcttggtaagacttt

SEQ ID NO: 90 - DNA, 8583 bp, Homo sapiens
cagaaagcggagagtcacagcggggccaggccctggggagcggagcctccaccgcccccctcattcccaggcaagggcttggggggaatgagccgggagagccgggtcccgagcctacagagccgggagcagctgagccgccggcgcctcggccgccgccgccgcctcctcctcctccgccgccgccagcccggagcctgagccggcggggcgggggggagaggagcgagcgcagcgcagcagcggagccccgcgaggcccgcccgggcgggtggggagggcagcccgggggactgggccccggggcggggtgggagggggggagaagacgaagacagggccgggtctctccgcggacgagacagcggggatcatggccgcgcaggtcgcccccgccgccgccagcagcctgggcaacccgccgccgccgccgccctcggagctgaagaaagccgagcagcagcagcgggaggaggcggggggcgaggcggcggcggcggcagcggccgagcgcggggaaatgaaggcagccgccgggcaggaaagcgagggccccgccgtggggccgccgcagccgctgggaaaggagctgcaggacggggccgagagcaatgggggtggcggcggcggcggagccggcagcggcggcgggcccggcgcggagccggacctgaagaactcgaacgggaacgcgggccctaggcccgccctgaacaataacctcacggagccgcccggcggcggcggtggcggcagcagcgatggggtgggggcgcctcctcactcagccgcggccgccttgccgcccccagcctacggcttcgggcaaccctacggccggagcccgtctgccgtcgccgccgccgcggccgccgtcttccaccaacaacatggcggacaacaaagccctggcctggcagcgctgcagagcggcggcggcgggggcctggagccctacgcggggccccagcagaactctcacgaccacggcttccccaaccaccagtacaactcctactaccccaaccgcagcgcctaccccccgcccgccccggcctacgcgctgagctccccgagaggtggcactccgggctccggcgcggcggcggctgccggctccaagccgcctccctcctccagcgcctccgcctcctcgtcgtcttcgtccttcgctcagcagcgcttcggggccatggggggaggcggcccctccgcggccggcgggggaactccccagcccaccgccacccccaccctcaaccaactgctcacgtcgcccagctcggcccggggctaccagggctaccccgggggcgactacagtggcgggccccaggacgggggcgccggcaagggcccggcggacatggcctcgcagtgttggggggctgcggcggcggcagctgcggcggcggccgcctcgggaggggcccaacaaaggagccaccacgcgcccatgagccccgggagcagcggcggcggggggcagccgctcgcccggacccctcagccatccagtccaatggatcagatgggcaagatgagacctcagccatatggcgggactaacccatactcgcagcaacagggacctccgtcaggaccgcagcaaggacatgggtacccagggcagccatacgggtcccagaccccgcagcggtacccgatgaccatgcagggccgggcgcagagtgccatgggcggcctctcttatacacagcagattcctccttatggacaacaaggccccagcgggtatggtcaacagggccagactccatattacaaccagcaaagtcctcaccctcagcagcagcagccaccctactcccagcaaccaccgtcccagacccctcatgcccaaccttcgtatcagcagcagccacagtctcaaccaccacagctccagtcctctcagcctccatactcccagcagccatcccagcctccacatcagcagtccccggctccatacccctcccagcagtcgacgacacagcagcacccccagagccagcccccctactcacagccacaggctcagtctccttaccagcagcagcaacctcagcagccagcaccctcgacgctctcccagcaggctgcgtatcctcagccccagtctcagcagtcccagcaaactgcctattcccagcagcgcttccctccaccgcaggagctatctcaagattcatttgggtctcaggcatcctcagccccctcaatgacctccagtaagggagggcaagaagatatgaacctgagccttcagtcaagaccctccagcttgcctgatctatctggttcaatagatgacctccccatggggacagaaggagctctgagtcctggagtgagcacatcagggatttccagcagccaaggagagcagagtaatccagctcagtctcctttctctcctcatacctcccctcacctgcctggcatccgaggcccttccccgtcccctgttggctctcccgccagtgttgctcagtctcgctcaggaccactctcgcctgctgcagtgccaggcaaccagatgccacctcggccacccagtggccagtcggacagcatcatgcatccttccatgaaccaatcaagcattgcccaagatcgaggttatatgcagaggaacccccagatgccccagtacagttccccccagcccggctcagccttatctccgcgtcagccttccggaggacagatacacacaggcatgggctcctaccagcagaactccatggggagctatggtccccaggggggtcagtatggcccacaaggtggctaccccaggcagccaaactataatgccttgcccaatgccaactaccccagtgcaggcatggctggaggcataaaccccatgggtgccggaggtcaaatgcatggacagcctggcatcccaccttatggcacactccctccagggaggatgagtcacgcctccatgggcaaccggccttatggccctaacatggccaatatgccacctcaggttgggtcagggatgtgtcccccaccagggggcatgaaccggaaaacccaagaaactgctgtcgccatgcatgttgctgccaactctatccaaaacaggccgccaggctaccccaatatgaatcaagggggcatgatgggaactggacctccttatggacaagggattaatagtatggctggcatgatcaaccctcagggacccccatattccatgggtggaaccatggccaacaattctgcagggatggcagccagcccagagatgatgggccttggggatgtaaagttaactccagccaccaaaatgaacaacaaggcagatgggacacccaagacagaatccaaatccaagaaatccagttcttctactacaaccaatgagaagatcaccaagttgtatgagctgggtggtgagcctgagaggaagatgtgggtggaccgttatctggccttcactgaggagaaggccatgggcatgacaaatctgcctgctgtgggtaggaaacctctggacctctatcgcctctatgtgtctgtgaaggagattggtggattgactcaggtcaacaagaacaaaaaatggcgggaacttgcaaccaacctcaatgtgggcacatcaagcagtgctgccagctccttgaaaaagcagtatatccagtgtctctatgcctttgaatgcaagattgaacggggagaagaccctcccccagacatctttgcagctgctgattccaagaagtcccagcccaagatccagcctccctctcctgcgggatcaggatctatgcaggggccccagactccccagtcaaccagcagttccatggcagaaggaggagacttaaagccaccaactccagcatccacaccacacagtcagatccccccattgccaggcatgagcaggagcaattcagttgggatccaggatgcctttaatgatggaagtgactccacattccagaagcggaattccatgactccaaaccctgggtatcagcccagtatgaatacctctgacatgatggggcgcatgtcctatgagccaaataaggatccttatggcagcatgaggaaagctccagggagtgatcccttcatgtcctcagggcagggccccaacggcgggatgggtgacccctacagtcgtgctgccggccctgggctaggaaatgtggcgatgggaccacgacagcactatccctatggaggtccttatgacagagtgaggacggagcctggaatagggcctgagggaaacatgagcactggggccccacagccgaatctcatgccttccaacccagactcggggatgtattctcctagccgctaccccccgcagcagcagcagcagcagcagcaacgacatgacctatggcaatcagttctccacccaaggcaccccttctggcagccccttccccagccagcagactacaatgtatcaacagcaacagcagaattacaagcggccaatggatggcacatatggccctcctgccaagcggcacgaaggggagatgtacagcgtgccatacagcactgggcaggggcagcctcagcagcagcagttgcccccagcccagccccagcctgccagccagcaacaagctgcccagccttcccctcagcaagatgtatacaaccagtatggcaatgcctatcctgccactgccacagctgctactgagcgccgaccagcaggcggcccccagaaccaatttccattccagtttggccgagaccgtgtctctgcaccccctggcaccaatgcccagcaaaacatgccaccacaaatgatgggcggccccatacaggcatcagctgaggttgctcagcaaggcaccatgtggcaggggcgtaatgacatgacctataattatgccaacaggcagagcacgggctctgccccccagggccccgcctatcatggcgtgaaccgaacagatgaaatgctgcacacagatcagagggccaaccacgaaggctcgtggccttcccatggcacacgccagcccccatatggtccctctgcccctgtgccccccatgacaaggccccctccatctaactaccagcccccaccaagcatgcagaatcacattcctcaggtatccagccctgctcccctgccccggccaatggagaaccgcacctctcctagcaagtctccattcctgcactctgggatgaaaatgcagaaggcaggtcccccagtacctgcctcgcacatagcacctgcccctgtgcagccccccatgattcggcgggatatcaccttcccacctggctctgttgaagccacacagcctgtgttgaagcagaggaggcggctcacaatgaaagacattggaaccccggaggcatggcgggtaatgatgtccctcaagtctggtctcctggcagagagcacatgggcattagataccatcaacatcctgctgtatgatgacaacagcatcatgaccttcaacctcagtcagctcccagggttgctagagctccttgtagaatatttccgacgatgcctgattgagatctttggcattttaaaggagtatgaggtgggtgacccaggacagagaacgctactggatcctgggaggttcagcaaggtgtctagtccagctcccatggagggtggggaagaagaagaagaacttctaggtcctaaactagaagaggaagaagaagaggaagtagttgaaaatgatgaggagatagccttttcaggcaaggacaagccagcttcagagaatagtgaggagaagctgatcagtaagtttgacaagcttccagtaaagatcgtacagaagaatgatccatttgtggtggactgctcagataagcttgggcgtgtgcaggagtttgacagtggcctgctgcactggcggattggtgggggggacaccactgagcatatccagacccacttcgagagcaagacagagctgctgccttcccggcctcacgcaccctgcccaccagcccctcggaagcatgtgacaacagcagagggtacaccagggacaacagaccaggaggggcccccacctgatggacctccagaaaaacggatcacagccactatggatgacatgttgtctactcggtctagcaccttgaccgaggatggagctaagagttcagaggccatcaaggagagcagcaagtttccatttggcattagcccagcacagagccaccggaacatcaagatcctagaggacgaaccccacagtaaggatgagaccccactgtgtacccttctggactggcaggattctcttgccaagcgctgcgtctgtgtgtccaataccattcgaagcctgtcatttgtgccaggcaatgactttgagatgtccaaacacccagggctgctgctcatcctgggcaagctgatcctgctgcaccacaagcacccagaacggaagcaggcaccactaacttatgaaaaggaggaggaacaggaccaaggggtgagctgcaacaaagtggagtggtggtgggactgcttggagatgctccgggaaaacaccttggttacactcgccaacatctcggggcagttggacctatctccataccccgagagcatttgcctgcctgtcctggacggactcctacactgggcagtttgcccttcagctgaagcccaggaccccttttccaccctgggccccaatgccgtcctttccccgcagagactggtcttggaaaccctcagcaaactcagcatccaggacaacaatgtggacctgattctggccacaccccccttcagccgcctggagaagttgtatagcactatggtgcgcttcctcagtgaccgaaagaacccggtgtgccgggagatggctgtggtactgctggccaacctggctcagggggacagcctggcagctcgtgccattgcagtgcagaagggcagtatcggcaacctcctgggcttcctagaggacagccttgccgccacacagttccagcagagccaggccagcctcctccacatgcagaacccaccctttgagccaactagtgtggacatgatgcggcgggctgcccgcgcgctgcttgccttggccaaggtggacgagaaccactcagagtttactctgtacgaatcacggctgttggacatctcggtatcaccgttgatgaactcattggtttcacaagtcatttgtgatgtactgtttttgattggccagtcatgacagccgtgggacacctcccccccccgtgtgtgtgtgcgtgtgtggagaacttagaaactgactgttgccctttatttatgcaaaaccacctcagaatccagtttaccctgtgctgtccagcttctcccttgggaaaaagtctctcctgtttctctctcctccttccacctcccctccctccatcacctcacgcctttctgttccttgtcctcaccttactcccctcaggaccctaccccaccctctttgaaaagacaaagctctgcctacatagaagactttttttattttaaccaaagttactgttgtttacagtgagtttggggaaaaaaaataaaataaaaatggctttcccagtccttgcatcaacgggatgccacatttcataactgtttttaatggtaaaaaaaaaaaaaaaaaatacaaaaaaaaattctgaaggacaaaaaaggtgactgctgaactgtgtgtggtttattgttgtacattcacaatcttgcaggagccaagaagttcgcagttgtgaacagaccctgttcactggagaggcctgtgcagtagagtgtagaccctttcatgtactgtactgtacacctgatactgtaaacatactgtaataataatgtctcacatggaaacagaaaacgctgggtcagcagcaagctgtagtttttaaaaatgtttttagttaaacgttgaggagaaaaaaaaaaaaggcttttcccccaaagtatcatgtgtgaacctacaacaccctgacctctttctctcctccttgattgtatgaataaccctgagatcacctcttagaactggttttaacctttagctgcagcggctacgctgccacgtgtgtatatatatgacgttgtacattgcacatacccttggatccccacagtttggtcctcctcccagctacccctttatagtatgacgagttaacaagttggtgacctgcacaaagcgagacacagctatttaatctcttgccagatatcgcccctcttggtgcgatgctgtacaggtctctgtaaaaagtccttgctgtctcagcagccaatcaacttatagtttatttttttctgggtttttgttttgttttgttttctttctaatcgaggtgtgaaaaagttctaggttcagttgaagttctgatgaagaaacacaattgagattttttcagtgataaaatctgcatatttgtatttcaacaatgtagctaaaacttgatgtaaattcctcctttttttccttttttggcttaatgaatatcatttattcagtatgaaatctttatactatatgttccacgtgttaagaataaatgtacattaaatcttggtaagacttt

SEQ ID NO: 91 - DNA, 8589 bp, Homo sapiens
cagaaagcggagagtcacagcggggccaggccctggggagcggagcctccaccgcccccctcattcccaggcaagggcttggggggaatgagccgggagagccgggtcccgagcctacagagccgggagcagctgagccgccggcgcctcggccgccgccgccgcctcctcctcctccgccgccgccagcccggagcctgagccggcggggcgggggggagaggagcgagcgcagcgcagcagcggagccccgcgaggcccgcccgggcgggtggggagggcagcccgggggactgggccccggggcggggtgggagggggggagaagacgaagacagggccgggtctctccgcggacgagacagcggggatcatggccgcgcaggtcgcccccgccgccgccagcagcctgggcaacccgccgccgccgccgccctcggagctgaagaaagccgagcagcagcagcgggaggaggcggggggcgaggcggcggcggcggcagcggccgagcgcggggaaatgaaggcagccgccgggcaggaaagcgagggccccgccgtggggccgccgcagccgctgggaaaggagctgcaggacggggccgagagcaatgggggtggcggcggcggcggagccggcagcggcggcgggcccggcgcggagccggacctgaagaactcgaacgggaacgcgggccctaggcccgccctgaacaataacctcacggagccgcccggcggcggcggtggcggcagcagcgatggggtgggggcgcctcctcactcagccgcggccgccttgccgcccccagcctacggcttcgggcaaccctacggccggagcccgtctgccgtcgccgccgccgcggccgccgtcttccaccaacaacatggcggacaacaaagccctggcctggcagcgctgcagagcggcggcggcgggggcctggagccctacgcggggccccagcagaactctcacgaccacggcttccccaaccaccagtacaactcctactaccccaaccgcagcgcctaccccccgcccgccccggcctacgcgctgagctccccgagaggtggcactccgggctccggcgcggcggcggctgccggctccaagccgcctccctcctccagcgcctccgcctcctcgtcgtcttcgtccttcgctcagcagcgcttcggggccatggggggaggcggcccctccgcggccggcgggggaactccccagcccaccgccacccccaccctcaaccaactgctcacgtcgcccagctcggcccggggctaccagggctaccccgggggcgactacagtggcgggccccaggacgggggcgccggcaagggcccggcggacatggcctcgcagtgttggggggctgcggcggcggcagctgcggcggcggccgcctcgggaggggcccaacaaaggagccaccacgcgcccatgagccccgggagcagcggcggcggggggcagccgctcgcccggacccctcagccatccagtccaatggatcagatgggcaagatgagacctcagccatatggcgggactaacccatactcgcagcaacagggacctccgtcaggaccgcagcaaggacatgggtacccagggcagccatacgggtcccagaccccgcagcggtacccgatgaccatgcagggccgggcgcagagtgccatgggcggcctctcttatacacagcagattcctccttatggacaacaaggccccagcgggtatggtcaacagggccagactccatattacaaccagcaaagtcctcaccctcagcagcagcagccaccctactcccagcaaccaccgtcccagacccctcatgcccaaccttcgtatcagcagcagccacagtctcaaccaccacagctccagtcctctcagcctccatactcccagcagccatcccagcctccacatcagcagtccccggctccatacccctcccagcagtcgacgacacagcagcacccccagagccagcccccctactcacagccacaggctcagtctccttaccagcagcagcaacctcagcagccagcaccctcgacgctctcccagcaggctgcgtatcctcagccccagtctcagcagtcccagcaaactgcctattcccagcagcgcttccctccaccgcaggagctatctcaagattcatttgggtctcaggcatcctcagccccctcaatgacctccagtaagggagggcaagaagatatgaacctgagccttcagtcaagaccctccagcttgcctgatctatctggttcaatagatgacctccccatggggacagaaggagctctgagtcctggagtgagcacatcagggatttccagcagccaaggagagcagagtaatccagctcagtctcctttctctcctcatacctcccctcacctgcctggcatccgaggcccttccccgtcccctgttggctctcccgccagtgttgctcagtctcgctcaggaccactctcgcctgctgcagtgccaggcaaccagatgccacctcggccacccagtggccagtcggacagcatcatgcatccttccatgaaccaatcaagcattgcccaagatcgaggttatatgcagaggaacccccagatgccccagtacagttccccccagcccggctcagccttatctccgcgtcagccttccggaggacagatacacacaggcatgggctcctaccagcagaactccatggggagctatggtccccaggggggtcagtatggcccacaaggtggctaccccaggcagccaaactataatgccttgcccaatgccaactaccccagtgcaggcatggctggaggcataaaccccatgggtgccggaggtcaaatgcatggacagcctggcatcccaccttatggcacactccctccagggaggatgagtcacgcctccatgggcaaccggccttatggccctaacatggccaatatgccacctcaggttgggtcagggatgtgtcccccaccagggggcatgaaccggaaaacccaagaaactgctgtcgccatgcatgttgctgccaactctatccaaaacaggccgccaggctaccccaatatgaatcaagggggcatgatgggaactggacctccttatggacaagggattaatagtatggctggcatgatcaaccctcagggacccccatattccatgggtggaaccatggccaacaattctgcagggatggcagccagcccagagatgatgggccttggggatgtaaagttaactccagccaccaaaatgaacaacaaggcagatgggacacccaagacagaatccaaatccaagaaatccagttcttctactacaaccaatgagaagatcaccaagttgtatgagctgggtggtgagcctgagaggaagatgtgggtggaccgttatctggccttcactgaggagaaggccatgggcatgacaaatctgcctgctgtgggtaggaaacctctggacctctatcgcctctatgtgtctgtgaaggagattggtggattgactcaggtcaacaagaacaaaaaatggcgggaacttgcaaccaacctcaatgtgggcacatcaagcagtgctgccagctccttgaaaaagcagtatatccagtgtctctatgcctttgaatgcaagattgaacggggagaagaccctcccccagacatctttgcagctgctgattccaagaagtcccagcccaagatccagcctccctctcctgcgggatcaggatctatgcaggggccccagactccccagtcaaccagcagttccatggcagaaggaggagacttaaagccaccaactccagcatccacaccacacagtcagatccccccattgccaggcatgagcaggagcaattcagttgggatccaggatgcctttaatgatggaagtgactccacattccagaagcggaattccatgactccaaaccctgggtatcagcccagtatgaatacctctgacatgatggggcgcatgtcctatgagccaaataaggatccttatggcagcatgaggaaagctccagggagtgatcccttcatgtcctcagggcagggccccaacggcgggatgggtgacccctacagtcgtgctgccggccctgggctaggaaatgtggcgatgggaccacgacagcactatccctatggaggtccttatgacagagtgaggacggagcctggaatagggcctgagggaaacatgagcactggggccccacagccgaatctcatgccttccaacccagactcggggatgtattctcctagccgctaccccccgcagcagcagcagcagcagcagcaacgacatgattcctatggcaatcagttctccacccaaggcaccccttctggcagccccttccccagccagcagactacaatgtatcaacagcaacagcagaattacaagcggccaatggatggcacatatggccctcctgccaagcggcacgaaggggagatgtacagcgtgccatacagcactgggcaggggcagcctcagcagcagcagttgcccccagcccagccccagcctgccagccagcaacaagctgcccagccttcccctcagcaagatgtatacaaccagtatggcaatgcctatcctgccactgccacagctgctactgagcgccgaccagcaggcggcccccagaaccaatttccattccagtttggccgagaccgtgtctctgcaccccctggcaccaatgcccagcaaaacatgccaccacaaatgatgggcggccccatacaggcatcagctgaggttgctcagcaaggcaccatgtggcaggggcgtaatgacatgacctataattatgccaacaggcagagcacgggctctgccccccagggccccgcctatcatggcgtgaaccgaacagatgaaatgctgcacacagatcagagggccaaccacgaaggctcgtggccttcccatggcacacgccagcccccatatggtccctctgcccctgtgccccccatgacaaggccccctccatctaactaccagcccccaccaagcatgcagaatcacattcctcaggtatccagccctgctcccctgccccggccaatggagaaccgcacctctcctagcaagtctccattcctgcactctgggatgaaaatgcagaaggcaggtcccccagtacctgcctcgcacatagcacctgcccctgtgcagccccccatgattcggcgggatatcaccttcccacctggctggctctgttgaagccacacagcctgtgttgaagcagaggaggcggctcacaatgaaagacattggaaccccggaggcatggcgggtaatgatgtccctcaagtctggtctcctggcagagagcacatgggcattagataccatcaacatcctgctgtatgatgacaacagcatcatgaccttcaacctcagtcagctcccagggttgctagagctccttgtagaatatttccgacgatgcctgattgagatctttggcattttaaaggagtatgaggtgggtgacccaggacagagaacgctactggatcctgggaggttcagcaaggtgtctagtccagctcccatggagggtggggaagaagaagaagaacttctaggtcctaaactagaagaggaagaagaagaggaagtagttgaaaatgatgaggagatagccttttcaggcaaggacaagccagcttcagagaatagtgaggagaagctgatcagtaagtttgacaagcttccagtaaagatcgtacagaagaatgatccatttgtggtggactgctcagataagcttgggcgtgtgcaggagtttgacagtggcctgctgcactggcggattggtgggggggacaccactgagcatatccagacccacttcgagagcaagacagagctgctgccttcccggcctcacgcaccctgcccaccagcccctcggaagcatgtgacaacagcagagggtacaccagggacaacagaccaggaggggcccccacctgatggacctccagaaaaacggatcacagccactatggatgacatgttgtctactcggtctagcaccttgaccgaggatggagctaagagttcagaggccatcaaggagagcagcaagtttccatttggcattagcccagcacagagccaccggaacatcaagatcctagaggacgaaccccacagtaaggatgagaccccactgtgtacccttctggactggcaggattctcttgccaagcgctgcgtctgtgtgtccaataccattcgaagcctgtcatttgtgccaggcaatgactttgagatgtccaaacacccagggctgctgctcatcctgggcaagctgatcctgctgcaccacaagcacccagaacggaagcaggcaccactaacttatgaaaaggaggaggaacaggaccaaggggtgagctgcaacaaagtggagtggtggtgggactgcttggagatgctccgggaaaacaccttggttacactcgccaacatctcggggcagttggacctatctccataccccgagagcatttgcctgcctgtcctggacggactcctacactgggcagtttgcccttcagctgaagcccaggaccccttttccaccctgggccccaatgccgtcctttccccgcagagactggtcttggaaaccctcagcaaactcagcatccaggacaacaatgtggacctgattctggccacaccccccttcagccgcctggagaagttgtatagcactatggtgcgcttcctcagtgaccgaaagaacccggtgtgccgggagatggctgtggtactgctggccaacctggctcagggggacagcctggcagctcgtgccattgcagtgcagaagggcagtatcggcaacctcctgggcttcctagaggacagccttgccgccacacagttccagcagagccaggccagcctcctccacatgcagaacccaccctttgagccaactagtgtggacatgatgcggcgggctgcccgcgcgctgcttgccttggccaaggtggacgagaaccactcagagtttactctgtacgaatcacggctgttggacatctcggtatcaccgttgatgaactcattggtttcacaagtcatttgtgatgtactgtttttgattggccagtcatgacagccgtgggacacctcccccccccgtgtgtgtgtgcgtgtgtggagaacttagaaactgactgttgccctttatttatgcaaaaccacctcagaatccagtttaccctgtgctgtccagcttctcccttgggaaaaagtctctcctgtttctctctcctccttccacctcccctccctccatcacctcacgcctttctgttccttgtcctcaccttactcccctcaggaccctaccccaccctctttgaaaagacaaagctctgcctacatagaagactttttttattttaaccaaagttactgttgtttacagtgagtttggggaaaaaaaataaaataaaaatggctttcccagtccttgcatcaacgggatgccacatttcataactgtttttaatggtaaaaaaaaaaaaaaaaaatacaaaaaaaaattctgaaggacaaaaaaggtgactgctgaactgtgtgtggtttattgttgtacattcacaatcttgcaggagccaagaagttcgcagttgtgaacagaccctgttcactggagaggcctgtgcagtagagtgtagaccctttcatgtactgtactgtacacctgatactgtaaacatactgtaataataatgtctcacatggaaacagaaaacgctgggtcagcagcaagctgtagtttttaaaaatgtttttagttaaacgttgaggagaaaaaaaaaaaaggcttttcccccaaagtatcatgtgtgaacctacaacaccctgacctctttctctcctccttgattgtatgaataaccctgagatcacctcttagaactggttttaacctttagctgcagcggctacgctgccacgtgtgtatatatatgacgttgtacattgcacatacccttggatccccacagtttggtcctcctcccagctacccctttatagtatgacgagttaacaagttggtgacctgcacaaagcgagacacagctatttaatctcttgccagatatcgcccctcttggtgcgatgctgtacaggtctctgtaaaaagtccttgctgtctcagcagccaatcaacttatagtttatttttttctgggtttttgttttgttttgttttctttctaatcgaggtgtgaaaaagttctaggttcagttgaagttctgatgaagaaacacaattgagattttttcagtgataaaatctgcatatttgtatttcaacaatgtagctaaaacttgatgtaaattcctcctttttttccttttttggcttaatgaatatcatttattcagtatgaaatctttatactatatgttccacgtgttaagaataaatgtacattaaatcttggtaagacttt

SEQ ID NO: 92 - DNA, 8586 bp, Homo sapiens
cagaaagcggagagtcacagcggggccaggccctggggagcggagcctccaccgcccccctcattcccaggcaagggcttggggggaatgagccgggagagccgggtcccgagcctacagagccgggagcagctgagccgccggcgcctcggccgccgccgccgcctcctcctcctccgccgccgccagcccggagcctgagccggcggggcgggggggagaggagcgagcgcagcgcagcagcggagccccgcgaggcccgcccgggcgggtggggagggcagcccgggggactgggccccggggcggggtgggagggggggagaagacgaagacagggccgggtctctccgcggacgagacagcggggatcatggccgcgcaggtcgcccccgccgccgccagcagcctgggcaacccgccgccgccgccgccctcggagctgaagaaagccgagcagcagcagcgggaggaggcggggggcgaggcggcggcggcggcagcggccgagcgcggggaaatgaaggcagccgccgggcaggaaagcgagggccccgccgtggggccgccgcagccgctgggaaaggagctgcaggacggggccgagagcaatgggggtggcggcggcggcggagccggcagcggcggcgggcccggcgcggagccggacctgaagaactcgaacgggaacgcgggccctaggcccgccctgaacaataacctcacggagccgcccggcggcggcggtggcggcagcagcgatggggtgggggcgcctcctcactcagccgcggccgccttgccgcccccagcctacggcttcgggcaaccctacggccggagcccgtctgccgtcgccgccgccgcggccgccgtcttccaccaacaacatggcggacaacaaagccctggcctggcagcgctgcagagcggcggcggcgggggcctggagccctacgcggggccccagcagaactctcacgaccacggcttccccaaccaccagtacaactcctactaccccaaccgcagcgcctaccccccgcccgccccggcctacgcgctgagctccccgagaggtggcactccgggctccggcgcggcggcggctgccggctccaagccgcctccctcctccagcgcctccgcctcctcgtcgtcttcgtccttcgctcagcagcgcttcggggccatggggggaggcggcccctccgcggccggcgggggaactccccagcccaccgccacccccaccctcaaccaactgctcacgtcgcccagctcggcccggggctaccagggctaccccgggggcgactacagtggcgggccccaggacgggggcgccggcaagggcccggcggacatggcctcgcagtgttggggggctgcggcggcggcagctgcggcggcggccgcctcgggaggggcccaacaaaggagccaccacgcgcccatgagccccgggagcagcggcggcggggggcagccgctcgcccggacccctcagccatccagtccaatggatcagatgggcaagatgagacctcagccatatggcgggactaacccatactcgcagcaacagggacctccgtcaggaccgcagcaaggacatgggtacccagggcagccatacgggtcccagaccccgcagcggtacccgatgaccatgcagggccgggcgcagagtgccatgggcggcctctcttatacacagcagattcctccttatggacaacaaggccccagcgggtatggtcaacagggccagactccatattacaaccagcaaagtcctcaccctcagcagcagcagccaccctactcccagcaaccaccgtcccagacccctcatgcccaaccttcgtatcagcagcagccacagtctcaaccaccacagctccagtcctctcagcctccatactcccagcagccatcccagcctccacatcagcagtccccggctccatacccctcccagcagtcgacgacacagcagcacccccagagccagcccccctactcacagccacaggctcagtctccttaccagcagcagcaacctcagcagccagcaccctcgacgctctcccagcaggctgcgtatcctcagccccagtctcagcagtcccagcaaactgcctattcccagcagcgcttccctccaccgcaggagctatctcaagattcatttgggtctcaggcatcctcagccccctcaatgacctccagtaagggagggcaagaagatatgaacctgagccttcagtcaagaccctccagcttgcctgatctatctggttcaatagatgacctccccatggggacagaaggagctctgagtcctggagtgagcacatcagggatttccagcagccaaggagagcagagtaatccagctcagtctcctttctctcctcatacctcccctcacctgcctggcatccgaggcccttccccgtcccctgttggctctcccgccagtgttgctcagtctcgctcaggaccactctcgcctgctgcagtgccaggcaaccagatgccacctcggccacccagtggccagtcggacagcatcatgcatccttccatgaaccaatcaagcattgcccaagatcgaggttatatgcagaggaacccccagatgccccagtacagttccccccagcccggctcagccttatctccgcgtcagccttccggaggacagatacacacaggcatgggctcctaccagcagaactccatggggagctatggtccccaggggggtcagtatggcccacaaggtggctaccccaggcagccaaactataatgccttgcccaatgccaactaccccagtgcaggcatggctggaggcataaaccccatgggtgccggaggtcaaatgcatggacagcctggcatcccaccttatggcacactccctccagggaggatgagtcacgcctccatgggcaaccggccttatggccctaacatggccaatatgccacctcaggttgggtcagggatgtgtcccccaccagggggcatgaaccggaaaacccaagaaactgctgtcgccatgcatgttgctgccaactctatccaaaacaggccgccaggctaccccaatatgaatcaagggggcatgatgggaactggacctccttatggacaagggattaatagtatggctggcatgatcaaccctcagggacccccatattccatgggtggaaccatggccaacaattctgcagggatggcagccagcccagagatgatgggccttggggatgtaaagttaactccagccaccaaaatgaacaacaaggcagatgggacacccaagacagaatccaaatccaagaaatccagttcttctactacaaccaatgagaagatcaccaagttgtatgagctgggtggtgagcctgagaggaagatgtgggtggaccgttatctggccttcactgaggagaaggccatgggcatgacaaatctgcctgctgtgggtaggaaacctctggacctctatcgcctctatgtgtctgtgaaggagattggtggattgactcaggtcaacaagaacaaaaaatggcgggaacttgcaaccaacctcaatgtgggcacatcaagcagtgctgccagctccttgaaaaagcagtatatccagtgtctctatgcctttgaatgcaagattgaacggggagaagaccctcccccagacatctttgcagctgctgattccaagaagtcccagcccaagatccagcctccctctcctgcgggatcaggatctatgcaggggccccagactccccagtcaaccagcagttccatggcagaaggaggagacttaaagccaccaactccagcatccacaccacacagtcagatccccccattgccaggcatgagcaggagcaattcagttgggatccaggatgcctttaatgatggaagtgactccacattccagaagcggaattccatgactccaaaccctgggtatcagcccagtatgaatacctctgacatgatggggcgcatgtcctatgagccaaataaggatccttatggcagcatgaggaaagctccagggagtgatcccttcatgtcctcagggcagggccccaacggcgggatgggtgacccctacagtcgtgctgccggccctgggctaggaaatgtggcgatgggaccacgacagcactatccctatggaggtccttatgacagagtgaggacggagcctggaataagggcctgagggaaacatgagcactggggccccacagccgaatctcatgccttccaacccagactcggggatgtattctcctagccgctaccccccgcagcagcagcagcagcagcagcaacgacatgattcctatggcaatcagttctccacccaaggcaccccttctggcagccccttccccagccagcagactacaatgtatcaacagcaacagcagaattacaagcggccaatggatggcacatatggccctcctgccaagcggcacgaaggggagatgtacagcgtgccatacagcactgggcaggggcagcctcagcagcagcagttgcccccagcccagccccagcctgccagccagcaacaagctgcccagccttcccctcagcaagatgtatacaaccagtatggcaatgcctatcctgccactgccacagctgctactgagcgccgaccagcaggcggcccccagaaccaatttccattccagtttggccgagaccgtgtctctgcaccccctggcaccaatgcccagcaaaacatgccaccacaaatgatgggcggccccatacaggcatcagctgaggttgctcagcaaggcaccatgtggcaggggcgtaatgacatgacctataattatgccaacaggcagagcacgggctctgccccccagggccccgcctatcatggcgtgaaccgaacagatgaaatgctgcacacagatcagagggccaaccacgaaggctcgtggccttcccatggcacacgccagcccccatatggtccctctgcccctgtgccccccatgacaaggccccctccatctaactaccagcccccaccaagcatgcagaatcacattcctcaggtatccagccctgctcccctgccccggccaatggagaaccgcacctctcctagcaagtctccattcctgcactctgggatgaaaatgcagaaggcaggtcccccagtacctgcctcgcacatagcacctgcccctgtgcagccccccatgattcggcgggatatcaccttcccacctggctctgttgaagccacacagcctgtgttgaagcagaggaggcggctcacaatgaaagacattggaaccccggaggcatggcgggtaatgatgtccctcaagtctggtctcctggcagagagcacatgggcattagataccatcaacatcctgctgtatgatgacaacagcatcatgaccttcaacctcagtcagctcccagggttgctagagctccttgtagaatatttccgacgatgcctgattgagatctttggcattttaaaggagtatgaggtgggtgacccaggacagagaacgctactggatcctgggaggttcagcaaggtgtctagtccagctcccatggagggtggggaagaagaagaagaacttctaggtcctaaactagaagaggaagaagaagaggaagtagttgaaaatgatgaggagatagccttttcaggcaaggacaagccagcttcagagaatagtgaggagaagctgatcagtaagtttgacaagcttccagtaaagatcgtacagaagaatgatccatttgtggtggactgctcagataagcttgggcgtgtgcaggagtttgacagtggcctgctgcactggcggattggtgggggggacaccactgagcatatccagacccacttcgagagcaagacagagctgctgccttcccggcctcacgcaccctgcccaccagcccctcggaagcatgtgacaacagcagagggtacaccagggacaacagaccaggaggggcccccacctgatggacctccagaaaaacggatcacagccactatggatgacatgttgtctactcggtctagcaccttgaccgaggatggagctaagagttcagaggccatcaaggagagcagcaagtttccatttggcattagcccagcacagagccaccggaacatcaagatcctagaggacgaaccccacagtaaggatgagaccccactgtgtacccttctggactggcaggattctcttgccaagcgctgcgtctgtgtgtccaataccattcgaagcctgtcatttgtgccaggcaatgactttgagatgtccaaacacccagggctgctgctcatcctgggcaagctgatcctgctgcaccacaagcacccagaacggaagcaggcaccactaacttatgaaaaggaggaggaacaggaccaaggggtgagctgcaacaaagtggagtggtggtgggactgcttggagatgctccgggaaaacaccttggttacactcgccaacatctcggggcagttggacctatctccataccccgagagcatttgcctgcctgtcctggacggactcctacactgggcagtttgcccttcagctgaagcccaggaccccttttccaccctgggccccaatgccgtcctttccccgcagagactggtcttggaaaccctcagcaaactcagcatccaggacaacaatgtggacctgattctggccacaccccccttcagccgcctggagaagttgtatagcactatggtgcgcttcctcagtgaccgaaagaacccggtgtgccgggagatggctgtggtactgctggccaacctggctcagggggacagcctggcagctcgtgccattgcagtgcagaagggcagtatcggcaacctcctgggcttcctagaggacagccttgccgccacacagttccagcagagccaggccagcctcctccacatgcagaacccaccctttgagccaactagtgtggacatgatgcggcgggctgcccgcgcgctgcttgccttggccaaggtggacgagaaccactcagagtttactctgtacgaatcacggctgttggacatctcggtatcaccgttgatgaactcattggtttcacaagtcatttgtgatgtactgtttttgattggccagtcatgacagccgtgggacacctcccccccccgtgtgtgtgtgcgtgtgtggagaacttagaaactgactgttgccctttatttatgcaaaaccacctcagaatccagtttaccctgtgctgtccagcttctcccttgggaaaaagtctctcctgtttctctctcctccttccacctcccctccctccatcacctcacgcctttctgttccttgtcctcaccttactcccctcaggaccctaccccaccctctttgaaaagacaaagctctgcctacatagaagactttttttattttaaccaaagttactgttgtttacagtgagtttggggaaaaaaaataaaataaaaatggctttcccagtccttgcatcaacgggatgccacatttcataactgtttttaatggtaaaaaaaaaaaaaaaaaatacaaaaaaaaattctgaaggacaaaaaaggtgactgctgaactgtgtgtggtttattgttgtacattcacaatcttgcaggagccaagaagttcgcagttgtgaacagaccctgttcactggagaggcctgtgcagtagagtgtagaccctttcatgtactgtactgtacacctgatactgtaaacatactgtaataataatgtctcacatggaaacagaaaacgctgggtcagcagcaagctgtagtttttaaaaatgtttttagttaaacgttgaggagaaaaaaaaaaaaggcttttcccccaaagtatcatgtgtgaacctacaacaccctgacctctttctctcctccttgattgtatgaataaccctgagatcacctcttagaactggttttaacctttagctgcagcggctacgctgccacgtgtgtatatatatgacgttgtacattgcacatacccttggatccccacagtttggtcctcctcccagctacccctttatagtatgacgagttaacaagttggtgacctgcacaaagcgagacacagctatttaatctcttgccagatatcgcccctcttggtgcgatgctgtacaggtctctgtaaaaagtccttgctgtctcagcagccaatcaacttatagtttatttttttctgggtttttgttttgttttgttttctttctaatcgaggtgtgaaaaagttctaggttcagttgaagttctgatgaagaaacacaattgagattttttcagtgataaaatctgcatatttgtatttcaacaatgtagctaaaacttgatgtaaattcctcctttttttccttttttggcttaatgaatatcatttattcagtatgaaatctttatactatatgttccacgtgttaagaataaatgtacattaaatcttggtaagacttt

SEQ ID NO: 93 - DNA, 8587 bp, Homo sapiens
cagaaagcggagagtcacagcggggccaggccctggggagcggagcctccaccgcccccctcattcccaggcaagggcttggggggaatgagccgggagagccgggtcccgagcctacagagccgggagcagctgagccgccggcgcctcggccgccgccgccgcctcctcctcctccgccgccgccagcccggagcctgagccggcggggcgggggggagaggagcgagcgcagcgcagcagcggagccccgcgaggcccgcccgggcgggtggggagggcagcccgggggactgggccccggggcggggtgggagggggggagaagacgaagacagggccgggtctctccgcggacgagacagcggggatcatggccgcgcaggtcgcccccgccgccgccagcagcctgggcaacccgccgccgccgccgccctcggagctgaagaaagccgagcagcagcagcgggaggaggcggggggcgaggcggcggcggcggcagcggccgagcgcggggaaatgaaggcagccgccgggcaggaaagcgagggccccgccgtggggccgccgcagccgctgggaaaggagctgcaggacggggccgagagcaatgggggtggcggcggcggcggagccggcagcggcggcgggcccggcgcggagccggacctgaagaactcgaacgggaacgcgggccctaggcccgccctgaacaataacctcacggagccgcccggcggcggcggtggcggcagcagcgatggggtgggggcgcctcctcactcagccgcggccgccttgccgcccccagcctacggcttcgggcaaccctacggccggagcccgtctgccgtcgccgccgccgcggccgccgtcttccaccaacaacatggcggacaacaaagccctggcctggcagcgctgcagagcggcggcggcgggggcctggagccctacgcggggccccagcagaactctcacgaccacggcttccccaaccaccagtacaactcctactaccccaaccgcagcgcctaccccccgcccgccccggcctacgcgctgagctccccgagaggtggcactccgggctccggcgcggcggcggctgccggctccaagccgcctccctcctccagcgcctccgcctcctcgtcgtcttcgtccttcgctcagcagcgcttcggggccatggggggaggcggcccctccgcggccggcgggggaactccccagcccaccgccacccccaccctcaaccaactgctcacgtcgcccagctcggcccggggctaccagggctaccccgggggcgactacagtggcgggccccaggacgggggcgccggcaagggcccggcggacatggcctcgcagtgttggggggctgcggcggcggcagctgcggcggcggccgcctcgggaggggcccaacaaaggagccaccacgcgcccatgagccccgggagcagcggcggcggggggcagccgctcgcccggacccctcagccatccagtccaatggatcagatgggcaagatgagacctcagccatatggcgggactaacccatactcgcagcaacagggacctccgtcaggaccgcagcaaggacatgggtacccagggcagccatacgggtcccagaccccgcagcggtacccgatgaccatgcagggccgggcgcagagtgccatgggcggcctctcttatacacagcagattcctccttatggacaacaaggccccagcgggtatggtcaacagggccagactccatattacaaccagcaaagtcctcaccctcagcagcagcagccaccctactcccagcaaccaccgtcccagacccctcatgcccaaccttcgtatcagcagcagccacagtctcaaccaccacagctccagtcctctcagcctccatactcccagcagccatcccagcctccacatcagcagtccccggctccatacccctcccagcagtcgacgacacagcagcacccccagagccagcccccctactcacagccacaggctcagtctccttaccagcagcagcaacctcagcagccagcaccctcgacgctctcccagcaggctgcgtatcctcagccccagtctcagcagtcccagcaaactgcctattcccagcagcgcttccctccaccgcaggagctatctcaagattcatttgggtctcaggcatcctcagccccctcaatgacctccagtaagggagggcaagaagatatgaacctgagccttcagtcaagaccctccagcttgcctgatctatctggttcaatagatgacctccccatggggacagaaggagctctgagtcctggagtgagcacatcagggatttccagcagccaaggagagcagagtaatccagctcagtctcctttctctcctcatacctcccctcacctgcctggcatccgaggcccttccccgtcccctgttggctctcccgccagtgttgctcagtctcgctcaggaccactctcgcctgctgcagtgccaggcaaccagatgccacctcggccacccagtggccagtcggacagcatcatgcatccttccatgaaccaatcaagcattgcccaagatcgaggttatatgcagaggaacccccagatgccccagtacagttccccccagcccggctcagccttatctccgcgtcagccttccggaggacagatacacacaggcatgggctcctaccagcagaactccatggggagctatggtccccaggggggtcagtatggcccacaaggtggctaccccaggcagccaaactataatgccttgcccaatgccaactaccccagtgcaggcatggctggaggcataaaccccatgggtgccggaggtcaaatgcatggacagcctggcatcccaccttatggcacactccctccagggaggatgagtcacgcctccatgggcaaccggccttatggccctaacatggccaatatgccacctcaggttgggtcagggatgtgtcccccaccagggggcatgaaccggaaaacccaagaaactgctgtcgccatgcatgttgctgccaactctatccaaaacaggccgccaggctaccccaatatgaatcaagggggcatgatgggaactggacctccttatggacaagggattaatagtatggctggcatgatcaaccctcagggacccccatattccatgggtggaaccatggccaacaattctgcagggatggcagccagcccagagatgatgggccttggggatgtaaagttaactccagccaccaaaatgaacaacaaggcagatgggacacccaagacagaatccaaatccaagaaatccagttcttctactacaaccaatgagaagatcaccaagttgtatgagctgggtggtgagcctgagaggaagatgtgggtggaccgttatctggccttcactgaggagaaggccatgggcatgacaaatctgcctgctgtgggtaggaaacctctggacctctatcgcctctatgtgtctgtgaaggagattggtggattgactcaggtcaacaagaacaaaaaatggcgggaacttgcaaccaacctcaatgtgggcacatcaagcagtgctgccagctccttgaaaaagcagtatatccagtgtctctatgcctttgaatgcaagattgaacggggagaagaccctcccccagacatctttgcagctgctgattccaagaagtcccagcccaagatccagcctccctctcctgcgggatcaggatctatgcaggggccccagactccccagtcaaccagcagttccatggcagaaggaggagacttaaagccaccaactccagcatccacaccacacagtcagatccccccattgccaggcatgagcaggagcaattcagttgggatccaggatgcctttaatgatggaagtgactccacattccagaagcggaattccatgactccaaaccctgggtatcagcccagtatgaatacctctgacatgatggggcgcatgtcctatgagccaaataaggatccttatggcagcatgaggaaagctccagggagtgatcccttcatgtcctcagggcagggccccaacggcgggatgggtgacccctacagtcgtgctgccggccctgggctaggaaatgtggcgatgggaccacgacagcactatccctatggaggtccttatgacagagtgaggacggagcctggaatagggcctgagggaaacatgagcactggggccccacagccgaatctcatgccttccaacccagactcggggatgtattctcctagccgctaccccccgcagcagcagcagcagcagcagcaacgacatgattcctatggcaatcagttctccacccaaggcaccccttctggcagccccttccccagccagcagactacaatgtatcaacagcaacagcagaattacaagcggccaatggatggcacatatggccctcctgccaagcggcacgaaggggagatgtacagcgtgccatacagcactgggcaggggcagcctcagcagcagcagttgcccccagcccagccccagcctgccagccagcaacaagctgcccagccttcccctcagcaagatgtatacaaccagtatggcaatgcctatcctgccactgccacagctgctactgagcgccgaccagcaggcggcccccagaaccaatttccattccagtttggccgagaccgtgtctctgcaccccctggcaccaatgcccagcaaaacatgccaccacaaatgatgggcggccccatacaggcatcagctgaggttgctcagcaaggcaccatgtggcaggggcgtaatgacatgacctataattatgccaacaggcagagcacgggctctgccccccagggccccgcctatcatggcgtgaaccgaacagatgaaatgctgcacacagatcagagggccaaccacgaaggctcgtggccttcccatggcacacgccagcccccatatggtccctctgcccctgtgccccccatgacaaggccccctccatctaactaccagcccccaccaagcatgcagaatcacattcctcaggtatccagccctgctcccctgccccggccaatggagaaccgcacctctcctagcaagtctccattcctgcactctgggatgaaaatgcagaaggcaggtcccccagtacctgcctcgcacatagcacctgcccctgtgcagccccccatgattcggcgggatatcaccttcccacctggctctgttgaagccacacagcctgtgttgaagcagaggaggcggctcacaatgaaagacattggaaccccggaggcatggcgggtaatgatgtccctcaagtctggtctcctggcagagagcacatgggcattagataccatcaacatcctgctgtatgatgacaacagcatcatgaccttcaacctcagtcagctcccagggttgctagagctccttgtagaatatttccgacgatgcctgattgagatctttggcattttaaaggagtatgaggtgggtgacccaggacagagaacgctactggatcctgggaggttcagcaaggtgtctagtccagctcccatggagggtggggaagaagaagaagaacttctaggtcctaaactagaagaggaagaagaagaggaagtagttgaaaatgatgaggagatagccttttcaggcaaggacaagccagcttcagagaatagtgaggagaagctgatcagtaagtttgacaagcttccagtaaagatcgtacagaagaatgatccatttgtggtggactgctcagataagcttgggcgtgtgcaggagtttgacagtggcctgctgcactggcggattggtgggggggacaccactgagcatatccagacccacttcgagagcaagacagagctgctgccttcccggcctcacgcaccctgcccaccagcccctcggaagcatgtgacaacagcagagggtacaccagggacaacagaccaggaggggcccccacctgatggacctccagaaaaacggatcacagccactatggatgacatgttgtctactcggtctagcaccttgaccgaggatggagctaagagttcagaggccatcaaggagagcagcaagtttccatttggcattagcccagcacagagccaccggaacatcaagatcctagaggacgaaccccacagtaaggatgagaccccactgtgtgtacccttctggactggcaggattctcttgccaagcgctgcgtctgtgtgtccaataccattcgaagcctgtcatttgtgccaggcaatgactttgagatgtccaaacacccagggctgctgctcatcctgggcaagctgatcctgctgcaccacaagcacccagaacggaagcaggcaccactaacttatgaaaaggaggaggaacaggaccaaggggtgagctgcaacaaagtggagtggtggtgggactgcttggagatgctccgggaaaacaccttggttacactcgccaacatctcggggcagttggacctatctccataccccgagagcatttgcctgcctgtcctggacggactcctacactgggcagtttgcccttcagctgaagcccaggaccccttttccaccctgggccccaatgccgtcctttccccgcagagactggtcttggaaaccctcagcaaactcagcatccaggacaacaatgtggacctgattctggccacaccccccttcagccgcctggagaagttgtatagcactatggtgcgcttcctcagtgaccgaaagaacccggtgtgccgggagatggctgtggtactgctggccaacctggctcagggggacagcctggcagctcgtgccattgcagtgcagaagggcagtatcggcaacctcctgggcttcctagaggacagccttgccgccacacagttccagcagagccaggccagcctcctccacatgcagaacccaccctttgagccaactagtgtggacatgatgcggcgggctgcccgcgcgctgcttgccttggccaaggtggacgagaaccactcagagtttactctgtacgaatcacggctgttggacatctcggtatcaccgttgatgaactcattggtttcacaagtcatttgtgatgtactgtttttgattggccagtcatgacagccgtgggacacctcccccccccgtgtgtgtgtgcgtgtgtggagaacttagaaactgactgttgccctttatttatgcaaaaccacctcagaatccagtttaccctgtgctgtccagcttctcccttgggaaaaagtctctcctgtttctctctcctccttccacctcccctccctccatcacctcacgcctttctgttccttgtcctcaccttactcccctcaggaccctaccccaccctctttgaaaagacaaagctctgcctacatagaagactttttttattttaaccaaagttactgttgtttacagtgagtttggggaaaaaaaataaaataaaaatggctttcccagtccttgcatcaacgggatgccacatttcataactgtttttaatggtaaaaaaaaaaaaaaaaaatacaaaaaaaaattctgaaggacaaaaaaggtgactgctgaactgtgtgtggtttattgttgtacattcacaatcttgcaggagccaagaagttcgcagttgtgaacagaccctgttcactggagaggcctgtgcagtagagtgtagaccctttcatgtactgtactgtacacctgatactgtaaacatactgtaataataatgtctcacatggaaacagaaaacgctgggtcagcagcaagctgtagtttttaaaaatgtttttagttaaacgttgaggagaaaaaaaaaaaaggcttttcccccaaagtatcatgtgtgaacctacaacaccctgacctctttctctcctccttgattgtatgaataaccctgagatcacctcttagaactggttttaacctttagctgcagcggctacgctgccacgtgtgtatatatatgacgttgtacattgcacatacccttggatccccacagtttggtcctcctcccagctacccctttatagtatgacgagttaacaagttggtgacctgcacaaagcgagacacagctatttaatctcttgccagatatcgcccctcttggtgcgatgctgtacaggtctctgtaaaaagtccttgctgtctcagcagccaatcaacttatagtttatttttttctgggtttttgttttgttttgttttctttctaatcgaggtgtgaaaaagttctaggttcagttgaagttctgatgaagaaacacaattgagattttttcagtgataaaatctgcatatttgtatttcaacaatgtagctaaaacttgatgtaaattcctcctttttttccttttttggcttaatgaatatcatttattcagtatgaaatctttatactatatgttccacgtgttaagaataaatgtacattaaatcttggtaagacttt

SEQ ID NO: 94 - DNA, 8585 bp, Homo sapiens
cagaaagcggagagtcacagcggggccaggccctggggagcggagcctccaccgcccccctcattcccaggcaagggcttggggggaatgagccgggagagccgggtcccgagcctacagagccgggagcagctgagccgccggcgcctcggccgccgccgccgcctcctcctcctccgccgccgccagcccggagcctgagccggcggggcgggggggagaggagcgagcgcagcgcagcagcggagccccgcgaggcccgcccgggcgggtggggagggcagcccgggggactgggccccggggcggggtgggagggggggagaagacgaagacagggccgggtctctccgcggacgagacagcggggatcatggccgcgcaggtcgcccccgccgccgccagcagcctgggcaacccgccgccgccgccgccctcggagctgaagaaagccgagcagcagcagcgggaggaggcggggggcgaggcggcggcggcggcagcggccgagcgcggggaaatgaaggcagccgccgggcaggaaagcgagggccccgccgtggggccgccgcagccgctgggaaaggagctgcaggacggggccgagagcaatgggggtggcggcggcggcggagccggcagcggcggcgggcccggcgcggagccggacctgaagaactcgaacgggaacgcgggccctaggcccgccctgaacaataacctcacggagccgcccggcggcggcggtggcggcagcagcgatggggtgggggcgcctcctcactcagccgcggccgccttgccgcccccagcctacggcttcgggcaaccctacggccggagcccgtctgccgtcgccgccgccgcggccgccgtcttccaccaacaacatggcggacaacaaagccctggcctggcagcgctgtagagcggcggcggcgggggcctggagccctacgcggggccccagcagaactctcacgaccacggcttccccaaccaccagtacaactcctactaccccaaccgcagcgcctaccccccgcccgccccggcctacgcgctgagctccccgagaggtggcactccgggctccggcgcggcggcggctgccggctccaagccgcctccctcctccagcgcctccgcctcctcgtcgtcttcgtccttcgctcagcagcgcttcggggccatggggggaggcggcccctccgcggccggcgggggaactccccagcccaccgccacccccaccctcaaccaactgctcacgtcgcccagctcggcccggggctaccagggctaccccgggggcgactacagtggcgggccccaggacgggggcgccggcaagggcccggcggacatggcctcgcagtgttggggggctgcggcggcggcagctgcggcggcggccgcctcgggaggggcccaacaaaggagccaccacgcgcccatgagccccgggagcagcggcggcggggggcagccgctcgcccggacccctcagccatccagtccaatggatcagatgggcaagatgagacctcagccatatggcgggactaacccatactcgcagcaacagggacctccgtcaggaccgcagcaaggacatgggtacccagggcagccatacgggtcccagaccccgcagcggtacccgatgaccatgcagggccgggcgcagagtgccatgggcggcctctcttatacacagcagattcctccttatggacaacaaggccccagcgggtatggtcaacagggccagactccatattacaaccagcaaagtcctcaccctcagcagcagcagccaccctactcccagcaaccaccgtcccagacccctcatgcccaaccttcgtatcagcagcagccacagtctcaaccaccacagctccagtcctctcagcctccatactcccagcagccatcccagcctccacatcagcagtccccggctccatacccctcccagcagtcgacgacacagcagcacccccagagccagcccccctactcacagccacaggctcagtctccttaccagcagcagcaacctcagcagccagcaccctcgacgctctcccagcaggctgcgtatcctcagccccagtctcagcagtcccagcaaactgcctattcccagcagcgcttccctccaccgcaggagctatctcaagattcatttgggtctcaggcatcctcagccccctcaatgacctccagtaagggagggcaagaagatatgaacctgagccttcagtcaagaccctccagcttgcctgatctatctggttcaatagatgacctccccatggggacagaaggagctctgagtcctggagtgagcacatcagggatttccagcagccaaggagagcagagtaatccagctcagtctcctttctctcctcatacctcccctcacctgcctggcatccgaggcccttccccgtcccctgttggctctcccgccagtgttgctcagtctcgctcaggaccactctcgcctgctgcagtgccaggcaaccagatgccacctcggccacccagtggccagtcggacagcatcatgcatccttccatgaaccaatcaagcattgcccaagatcgaggttatatgcagaggaacccccagatgccccagtacagttccccccagcccggctcagccttatctccgcgtcagccttccggaggacagatacacacaggcatgggctcctaccagcagaactccatggggagctatggtccccaggggggtcagtatggcccacaaggtggctaccccaggcagccaaactataatgccttgcccaatgccaactaccccagtgcaggcatggctggaggcataaaccccatgggtgccggaggtcaaatgcatggacagcctggcatcccaccttatggcacactccctccagggaggatgagtcacgcctccatgggcaaccggccttatggccctaacatggccaatatgccacctcaggttgggtcagggatgtgtcccccaccagggggcatgaaccggaaaacccaagaaactgctgtcgccatgcatgttgctgccaactctatccaaaacaggccgccaggctaccccaatatgaatcaagggggcatgatgggaactggacctccttatggacaagggattaatagtatggctggcatgatcaaccctcagggacccccatattccatgggtggaaccatggccaacaattctgcagggatggcagccagcccagagatgatgggccttggggatgtaaagttaactccagccaccaaaatgaacaacaaggcagatgggacacccaagacagaatccaaatccaagaaatccagttcttctactacaaccaatgagaagatcaccaagttgtatgagctgggtggtgagcctgagaggaagatgtgggtggaccgttatctggccttcactgaggagaaggccatgggcatgacaaatctgcctgctgtgggtaggaaacctctggacctctatcgcctctatgtgtctgtgaaggagattggtggattgactcaggtcaacaagaacaaaaaatggcgggaacttgcaaccaacctcaatgtgggcacatcaagcagtgctgccagctccttgaaaaagcagtatatccagtgtctctatgcctttgaatgcaagattgaacggggagaagaccctcccccagacatctttgcagctgctgattccaagaagtcccagcccaagatccagcctccctctcctgcgggatcaggatctatgcaggggccccagactccccagtcaaccagcagttccatggcagaaggaggagacttaaagccaccaactccagcatccacaccacacagtcagatccccccattgccaggcatgagcaggagcaattcagttgggatccaggatgcctttaatgatggaagtgactccacattccagaagcggaattccatgactccaaaccctgggtatcagcccagtatgaatacctctgacatgatggggcgcatgtcctatgagccaaataaggatccttatggcagcatgaggaaagctccagggagtgatcccttcatgtcctcagggcagggccccaacggcgggatgggtgacccctacagtcgtgctgccggccctgggctaggaaatgtggcgatgggaccacgacagcactatccctatggaggtccttatgacagagtgaggacggagcctggaatagggcctgagggaaacatgagcactggggccccacagccgaatctcatgccttccaacccagactcggggatgtattctcctagccgctaccccccgcagcagcagcagcagcagcagcaacgacatgattcctatggcaatcagttctccacccaaggcaccccttctggcagccccttccccagccagcagactacaatgtatcaacagcaacagcagaattacaagcggccaatggatggcacatatggccctcctgccaagcggcacgaaggggagatgtacagcgtgccatacagcactgggcaggggcagcctcagcagcagcagttgcccccagcccagccccagcctgccagccagcaacaagctgcccagccttcccctcagcaagatgtatacaaccagtatggcaatgcctatcctgccactgccacagctgctactgagcgccgaccagcaggcggcccccagaaccaatttccattccagtttggccgagaccgtgtctctgcaccccctggcaccaatgcccagcaaaacatgccaccacaaatgatgggcggccccatacaggcatcagctgaggttgctcagcaaggcaccatgtggcaggggcgtaatgacatgacctataattatgccaacaggcagagcacgggctctgccccccagggccccgcctatcatggcgtgaaccgaacagatgaaatgctgcacacagatcagagggccaaccacgaaggctcgtggccttcccatggcacacgccagcccccatatggtccctctgcccctgtgccccccatgacaaggccccctccatctaactaccagcccccaccaagcatgcagaatcacattcctcaggtatccagccctgctcccctgccccggccaatggagaaccgcacctctcctagcaagtctccattcctgcactctgggatgaaaatgcagaaggcaggtcccccagtacctgcctcgcacatagcacctgcccctgtgcagccccccatgattcggcgggatatcaccttcccacctggctctgttgaagccacacagcctgtgttgaagcagaggaggcggctcacaatgaaagacattggaaccccggaggcatggcgggtaatgatgtccctcaagtctggtctcctggcagagagcacatgggcattagataccatcaacatcctgctgtatgatgacaacagcatcatgaccttcaacctcagtcagctcccagggttgctagagctccttgtagaatatttccgacgatgcctgattgagatctttggcattttaaaggagtatgaggtgggtgacccaggacagagaacgctactggatcctgggaggttcagcaaggtgtctagtccagctcccatggagggtggggaagaagaagaagaacttctaggtcctaaactagaagaggaagaagaagaggaagtagttgaaaatgatgaggagatagccttttcaggcaaggacaagccagcttcagagaatagtgaggagaagctgatcagtaagtttgacaagcttccagtaaagatcgtacagaagaatgatccatttgtggtggactgctcagataagcttgggcgtgtgcaggagtttgacagtggcctgctgcactggcggattggtgggggggacaccactgagcatatccagacccacttcgagagcaagacagagctgctgccttcccggcctcacgcaccctgcccaccagcccctcggaagcatgtgacaacagcagagggtacaccagggacaacagaccaggaggggcccccacctgatggacctccagaaaaacggatcacagccactatggatgacatgttgtctactcggtctagcaccttgaccgaggatggagctaagagttcagaggccatcaaggagagcagcaagtttccatttggcattagcccagcacagagccaccggaacatcaagatcctagaggacgaaccccacagtaaggatgagaccccactgtgtacccttctggactggcaggattctcttgccaagcgctgcgtctgtgtgtccaataccattcgaagcctgtcatttgtgccaggcaatgactttgagatgtccaaacacccagggctgctgctcatcctgggcaagctgatcctgctgcaccacaagcacccagaacggaagcaggcaccactaacttatgaaaaggaggaggaacaggaccaaggggtgagctgcaacaaagtggagtggtggtgggactgcttggagatgctccgggaaaacaccttggttacactcgccaacatctcggggcagttggacctatctccataccccgagagcatttgcctgcctgtcctggacggactcctacactgggcagtttgcccttcagctgaagcccaggaccccttttccaccctgggccccaatgccgtcctttccccgcagagactggtcttggaaaccctcagcaaactcagcatccaggacaacaatgtggacctgattctggccacaccccccttcagccgcctggagaagttgtatagcactatggtgcgcttcctcagtgaccgaaagaacccggtgtgccgggagatggctgtggtactgctggccaacctggctcagggggacagcctggcagctcgtgccattgcagtgcagaagggcagtatcggcaacctcctgggcttcctagaggacagccttgccgccacacagttccagcagagccaggccagcctcctccacatgcagaacccaccctttgagccaactagtgtggacatgatgcggcgggctgcccgcgcgctgcttgccttggccaaggtggacgagaaccactcagagtttactctgtacgaatcacggctgttggacatctcggtatcaccgttgatgaactcattggtttcacaagtcatttgtgatgtactgtttttgattggccagtcatgacagccgtgggacacctcccccccccgtgtgtgtgtgcgtgtgtggagaacttagaaactgactgttgccctttatttatgcaaaaccacctcagaatccagtttaccctgtgctgtccagcttctcccttgggaaaaagtctctcctgtttctctctcctccttccacctcccctccctccatcacctcacgcctttctgttccttgtcctcaccttactcccctcaggaccctaccccaccctctttgaaaagacaaagctctgcctacatagaagactttttttattttaaccaaagttactgttgtttacagtgagtttggggaaaaaaaataaaataaaaatggctttcccagtccttgcatcaacgggatgccacatttcataactgtttttaatggtaaaaaaaaaaaaaaaaaatacaaaaaaaaattctgaaggacaaaaaaggtgactgctgaactgtgtgtggtttattgttgtacattcacaatcttgcaggagccaagaagttcgcagttgtgaacagaccctgttcactggagaggcctgtgcagtagagtgtagaccctttcatgtactgtactgtacacctgatactgtaaacatactgtaataataatgtctcacatggaaacagaaaacgctgggtcagcagcaagctgtagtttttaaaaatgtttttagttaaacgttgaggagaaaaaaaaaaaaggcttttcccccaaagtatcatgtgtgaacctacaacaccctgacctctttctctcctccttgattgtatgaataaccctgagatcacctcttagaactggttttaacctttagctgcagcggctacgctgccacgtgtgtatatatatgacgttgtacattgcacatacccttggatccccacagtttggtcctcctcccagctacccctttatagtatgacgagttaacaagttggtgacctgcacaaagcgagacacagctatttaatctcttgccagatatcgcccctcttggtgcgatgctgtacaggtctctgtaaaaagtccttgctgtctcagcagccaatcaacttatagtttatttttttctgggtttttgttttgttttgttttctttctaatcgaggtgtgaaaaagttctaggttcagttgaagttctgatgaagaaacacaattgagattttttcagtgataaaatctgcatatttgtatttcaacaatgtagctaaaacttgatgtaaattcctcctttttttccttttttggcttaatgaatatcatttattcagtatgaaatctttatactatatgttccacgtgttaagaataaatgtacattaaatcttggtaagacttt

SEQ ID NO: 95 - DNA, 8570 bp, Homo sapiens
cagaaagcggagagtcacagcggggccaggccctggggagcggagcctccaccgcccccctcattcccaggcaagggcttggggggaatgagccgggagagccgggtcccgagcctacagagccgggagcagctgagccgccggcgcctcggccgccgccgccgcctcctcctcctccgccgccgccagcccggagcctgagccggcggggcgggggggagaggagcgagcgcagcgcagcagcggagccccgcgaggcccgcccgggcgggtggggagggcagcccgggggactgggccccggggcggggtgggagggggggagaagacgaagacagggccgggtctctccgcggacgagacagcggggatcatggccgcgcaggtcgcccccgccgccgccagcagcctgggcaacccgccgccgccgccgccctcggagctgaagaaagccgagcagcagcagcgggaggaggcggggggcgaggcggcggcggcggcagcggccgagcgcggggaaatgaaggcagccgccgggcaggaaagcgagggccccgccgtggggccgccgcagccgctgggaaaggagctgcaggacggggccgagagcaatgggggtggcggcggcggcggagccggcagcggcggcgggcccggcgcggagccggacctgaagaactcgaacgggaacgcgggccctaggcccgccctgaacaataacctcacggagccgcccggcggcggcggtggcggcagcagcgatggggtgggggcgcctcctcactcagccgcggccgccttgccgcccccagcctacggcttcgggcaaccctacggccggagcccgtctgccgtcgccgccgccgcggccgccgtcttccaccaacaacatggcggacaacaaagccctggcctggcagcgctgcagagcggcggcggcgggggcctggagccctacgcggggccccagcagaactctcacgaccacggcttccccaaccaccagtacaactcctactaccccaaccgcagcgcctaccccccgcccgccccggcctacgcgctgagctccccgagaggtggcactccgggctccggcgcggcggcggctgccggctccaagccgcctccctcctccagcgcctccgcctcctcgtcgtcttcgtccttcgctcagcagcgcttcggggccatggggggaggcggcccctccgcggccggcgggggaactccccagcccaccgccacccccaccctcaaccaactgctcacgtcgcccagctcggcccggggctaccagggctaccccgggggcgactacagtggcgggccccaggacgggggcgccggcaagggcccggcggacatggcctcgcagtgttggggggctgcggcggcggccgcctcgggaggggcccaacaaaggagccaccacgcgcccatgagccccgggagcagcggcggcggggggcagccgctcgcccggacccctcagccatccagtccaatggatcagatgggcaagatgagacctcagccatatggcgggactaacccatactcgcagcaacagggacctccgtcaggaccgcagcaaggacatgggtacccagggcagccatacgggtcccagaccccgcagcggtacccgatgaccatgcagggccgggcgcagagtgccatgggcggcctctcttatacacagcagattcctccttatggacaacaaggccccagcgggtatggtcaacagggccagactccatattacaaccagcaaagtcctcaccctcagcagcagcagccaccctactcccagcaaccaccgtcccagacccctcatgcccaaccttcgtatcagcagcagccacagtctcaaccaccacagctccagtcctctcagcctccatactcccagcagccatcccagcctccacatcagcagtccccggctccatacccctcccagcagtcgacgacacagcagcacccccagagccagcccccctactcacagccacaggctcagtctccttaccagcagcagcaacctcagcagccagcaccctcgacgctctcccagcaggctgcgtatcctcagccccagtctcagcagtcccagcaaactgcctattcccagcagcgcttccctccaccgcaggagctatctcaagattcatttgggtctcaggcatcctcagccccctcaatgacctccagtaagggagggcaagaagatatgaacctgagccttcagtcaagaccctccagcttgcctgatctatctggttcaatagatgacctccccatggggacagaaggagctctgagtcctggagtgagcacatcagggatttccagcagccaaggagagcagagtaatccagctcagtctcctttctctcctcatacctcccctcacctgcctggcatccgaggcccttccccgtcccctgttggctctcccgccagtgttgctcagtctcgctcaggaccactctcgcctgctgcagtgccaggcaaccagatgccacctcggccacccagtggccagtcggacagcatcatgcatccttccatgaaccaatcaagcattgcccaagatcgaggttatatgcagaggaacccccagatgccccagtacagttccccccagcccggctcagccttatctccgcgtcagccttccggaggacagatacacacaggcatgggctcctaccagcagaactccatggggagctatggtccccaggggggtcagtatggcccacaaggtggctaccccaggcagccaaactataatgccttgcccaatgccaactaccccagtgcaggcatggctggaggcataaaccccatgggtgccggaggtcaaatgcatggacagcctggcatcccaccttatggcacactccctccagggaggatgagtcacgcctccatgggcaaccggccttatggccctaacatggccaatatgccacctcaggttgggtcagggatgtgtcccccaccagggggcatgaaccggaaaacccaagaaactgctgtcgccatgcatgttgctgccaactctatccaaaacaggccgccaggctaccccaatatgaatcaagggggcatgatgggaactggacctccttatggacaagggattaatagtatggctggcatgatcaaccctcagggacccccatattccatgggtggaaccatggccaacaattctgcagggatggcagccagcccagagatgatgggccttggggatgtaaagttaactccagccaccaaaatgaacaacaaggcagatgggacacccaagacagaatccaaatccaagaaatccagttcttctactacaaccaatgagaagatcaccaagttgtatgagctgggtggtgagcctgagaggaagatgtgggtggaccgttatctggccttcactgaggagaaggccatgggcatgacaaatctgcctgctgtgggtaggaaacctctggacctctatcgcctctatgtgtctgtgaaggagattggtggattgactcaggtcaacaagaacaaaaaatggcgggaacttgcaaccaacctcaatgtgggcacatcaagcagtgctgccagctccttgaaaaagcagtatatccagtgtctctatgcctttgaatgcaagattgaacggggagaagaccctcccccagacatctttgcagctgctgattccaagaagtcccagcccaagatccagcctccctctcctgcgggatcaggatctatgcaggggccccagactccccagtcaaccagcagttccatggcagaaggaggagacttaaagccaccaactccagcatccacaccacacagtcagatccccccattgccaggcatgagcaggagcaattcagttgggatccaggatgcctttaatgatggaagtgactccacattccagaagcggaattccatgactccaaaccctgggtatcagcccagtatgaatacctctgacatgatggggcgcatgtcctatgagccaaataaggatccttatggcagcatgaggaaagctccagggagtgatcccttcatgtcctcagggcagggccccaacggcgggatgggtgacccctacagtcgtgctgccggccctgggctaggaaatgtggcgatgggaccacgacagcactatccctatggaggtccttatgacagagtgaggacggagcctggaatagggcctgagggaaacatgagcactggggccccacagccgaatctcatgccttccaacccagactcggggatgtattctcctagccgctaccccccgcagcagcagcagcagcagcagcaacgacatgattcctatggcaatcagttctccacccaaggcaccccttctggcagccccttccccagccagcagactacaatgtatcaacagcaacagcagaattacaagcggccaatggatggcacatatggccctcctgccaagcggcacgaaggggagatgtacagcgtgccatacagcactgggcaggggcagcctcagcagcagcagttgcccccagcccagccccagcctgccagccagcaacaagctgcccagccttcccctcagcaagatgtatacaaccagtatggcaatgcctatcctgccactgccacagctgctactgagcgccgaccagcaggcggcccccagaaccaatttccattccagtttggccgagaccgtgtctctgcaccccctggcaccaatgcccagcaaaacatgccaccacaaatgatgggcggccccatacaggcatcagctgaggttgctcagcaaggcaccatgtggcaggggcgtaatgacatgacctataattatgccaacaggcagagcacgggctctgccccccagggccccgcctatcatggcgtgaaccgaacagatgaaatgctgcacacagatcagagggccaaccacgaaggctcgtggccttcccatggcacacgccagcccccatatggtccctctgcccctgtgccccccatgacaaggccccctccatctaactaccagcccccaccaagcatgcagaatcacattcctcaggtatccagccctgctcccctgccccggccaatggagaaccgcacctctcctagcaagtctccattcctgcactctgggatgaaaatgcagaaggcaggtcccccagtacctgcctcgcacatagcacctgcccctgtgcagccccccatgattcggcgggatatcaccttcccacctggctctgttgaagccacacagcctgtgttgaagcagaggaggcggctcacaatgaaagacattggaaccccggaggcatggcgggtaatgatgtccctcaagtctggtctcctggcagagagcacatgggcattagataccatcaacatcctgctgtatgatgacaacagcatcatgaccttcaacctcagtcagctcccagggttgctagagctccttgtagaatatttccgacgatgcctgattgagatctttggcattttaaaggagtatgaggtgggtgacccaggacagagaacgctactggatcctgggaggttcagcaaggtgtctagtccagctcccatggagggtggggaagaagaagaagaacttctaggtcctaaactagaagaggaagaagaagaggaagtagttgaaaatgatgaggagatagccttttcaggcaaggacaagccagcttcagagaatagtgaggagaagctgatcagtaagtttgacaagcttccagtaaagatcgtacagaagaatgatccatttgtggtggactgctcagataagcttgggcgtgtgcaggagtttgacagtggcctgctgcactggcggattggtgggggggacaccactgagcatatccagacccacttcgagagcaagacagagctgctgccttcccggcctcacgcaccctgcccaccagcccctcggaagcatgtgacaacagcagagggtacaccagggacaacagaccaggaggggcccccacctgatggacctccagaaaaacggatcacagccactatggatgacatgttgtctactcggtctagcaccttgaccgaggatggagctaagagttcagaggccatcaaggagagcagcaagtttccatttggcattagcccagcacagagccaccggaacatcaagatcctagaggacgaaccccacagtaaggatgagaccccactgtgtacccttctggactggcaggattctcttgccaagcgctgcgtctgtgtgtccaataccattcgaagcctgtcatttgtgccaggcaatgactttgagatgtccaaacacccagggctgctgctcatcctgggcaagctgatcctgctgcaccacaagcacccagaacggaagcaggcaccactaacttatgaaaaggaggaggaacaggaccaaggggtgagctgcaacaaagtggagtggtggtgggactgcttggagatgctccgggaaaacaccttggttacactcgccaacatctcggggcagttggacctatctccataccccgagagcatttgcctgcctgtcctggacggactcctacactgggcagtttgcccttcagctgaagcccaggaccccttttccaccctgggccccaatgccgtcctttccccgcagagactggtcttggaaaccctcagcaaactcagcatccaggacaacaatgtggacctgattctggccacaccccccttcagccgcctggagaagttgtatagcactatggtgcgcttcctcagtgaccgaaagaacccggtgtgccgggagatggctgtggtactgctggccaacctggctcagggggacagcctggcagctcgtgccattgcagtgcagaagggcagtatcggcaacctcctgggcttcctagaggacagccttgccgccacacagttccagcagagccaggccagcctcctccacatgcagaacccaccctttgagccaactagtgtggacatgatgcggcgggctgcccgcgcgctgcttgccttggccaaggtggacgagaaccactcagagtttactctgtacgaatcacggctgttggacatctcggtatcaccgttgatgaactcattggtttcacaagtcatttgtgatgtactgtttttgattggccagtcatgacagccgtgggacacctcccccccccgtgtgtgtgtgcgtgtgtggagaacttagaaactgactgttgccctttatttatgcaaaaccacctcagaatccagtttaccctgtgctgtccagcttctcccttgggaaaaagtctctcctgtttctctctcctccttccacctcccctccctccatcacctcacgcctttctgttccttgtcctcaccttactcccctcaggaccctaccccaccctctttgaaaagacaaagctctgcctacatagaagactttttttattttaaccaaagttactgttgtttacagtgagtttggggaaaaaaaataaaataaaaatggctttcccagtccttgcatcaacgggatgccacatttcataactgtttttaatggtaaaaaaaaaaaaaaaaaatacaaaaaaaaattctgaaggacaaaaaaggtgactgctgaactgtgtgtggtttattgttgtacattcacaatcttgcaggagccaagaagttcgcagttgtgaacagaccctgttcactggagaggcctgtgcagtagagtgtagaccctttcatgtactgtactgtacacctgatactgtaaacatactgtaataataatgtctcacatggaaacagaaaacgctgggtcagcagcaagctgtagtttttaaaaatgtttttagttaaacgttgaggagaaaaaaaaaaaaggcttttcccccaaagtatcatgtgtgaacctacaacaccctgacctctttctctcctccttgattgtatgaataaccctgagatcacctcttagaactggttttaacctttagctgcagcggctacgctgccacgtgtgtatatatatgacgttgtacattgcacatacccttggatccccacagtttggtcctcctcccagctacccctttatagtatgacgagttaacaagttggtgacctgcacaaagcgagacacagctatttaatctcttgccagatatcgcccctcttggtgcgatgctgtacaggtctctgtaaaaagtccttgctgtctcagcagccaatcaacttatagtttatttttttctgggtttttgttttgttttgttttctttctaatcgaggtgtgaaaaagttctaggttcagttgaagttctgatgaagaaacacaattgagattttttcagtgataaaatctgcatatttgtatttcaacaatgtagctaaaacttgatgtaaattcctcctttttttccttttttggcttaatgaatatcatttattcagtatgaaatctttatactatatgttccacgtgttaagaataaatgtacattaaatcttggtaagacttt

SEQ ID NO: 96 - DNA, 8585 bp, Homo sapiens
cagaaagcggagagtcacagcggggccaggccctggggagcggagcctccaccgcccccctcattcccaggcaagggcttggggggaatgagccgggagagccgggtcccgagcctacagagccgggagcagctgagccgccggcgcctcggccgccgccgccgcctcctcctcctccgccgccgccagcccggagcctgagccggcggggcgggggggagaggagcgagcgcagcgcagcagcggagccccgcgaggcccgcccgggcgggtggggagggcagcccgggggactgggccccggggcggggtgggagggggggagaagacgaagacagggccgggtctctccgcggacgagacagcggggatcatggccgcgcaggtcgcccccgccgccgccagcagcctgggcaacccgccgccgccgccgccctcggagctgaagaaagccgagcagcagcagcgggaggaggcggggggcgaggcggcggcggcggcagcggccgagcgcggggaaatgaaggcagccgccgggcaggaaagcgagggccccgccgtggggccgccgcagccgctgggaaaggagctgcaggacggggccgagagcaatgggggtggcggcggcggcggagccggcagcggcggcgggcccggcgcggagccggacctgaagaactcgaacgggaacgcgggccctaggcccgccctgaacaataacctcacggagccgcccggcggcggcggtggcggcagcagcgatggggtgggggcgcctcctcactcagccgcggccgccttgccgcccccagcctacggcttcgggcaaccctacggccggagcccgtctgccgtcgccgccgccgcggccgccgtcttccaccaacaacatggcggacaacaaagccctggcctggcagcgctgcagagcggcggcggcgggggcctggagccctacgcggggccccagcagaactctcacgaccacggcttccccaaccaccagtacaactcctactaccccaaccgcagcgcctaccccccgcccgccccggcctacgcgctgagctccccgagaggtggcactccgggctccggcgcggcggcggctgccggctccaagccgcctccctcctccagcgcctccgcctcctcgtcgtcttcgtccttcgctcagcagcgcttcggggccatggggggaggcggcccctccgcggccggcgggggaactccccagcccaccgccacccccaccctcaaccaactgctcacgtcgcccagctcggcccggggctaccagggctaccccgggggcgactacagtggcgggccccaggacgggggcgccggcaagggcccggcggacatggcctcgcagtgttggggggctgcggcggcggcagctgcggcggcggccgcctcgggaggggcccaacaaaggagccaccacgcgcccatgagccccgggagcagcggcggcggggggcagccgctcgcccggacccctcagccatccagtccaatggatcagatgggcaagatgagacctcagccatatggcgggactaacccatactcgcagcaacagggacctccgtcaggaccgcagcaaggacatgggtacccagggcagccatacgggtcccagaccccgcagcggtacccgatgaccatgcagggccgggcgcagagtgccatgggcggcctctcttatacacagcagattcctccttatggacaacaaggccccagcgggtatggtcaacagggccagactccatattacaaccagcaaagtcctcaccctcagcagcagcagccaccctactcccagcaaccaccgtcccagacccctcatgcccaaccttcgtatcagcagcagccacagtctcaaccaccacagctccagtcctctcagcctccatactcccagcagccatcccagcctccacatcagcagtccccggctccatacccctcccagcagtcgacgacacagcagcacccccagagccagcccccctactcacagccacaggctcagtctccttaccagcagcagcaacctcagcagccagcaccctcgacgctctcccagcaggctgcgtatcctcagccccagtctcagcagtcccagcaaactgcctattcccagcagcgcttccctccaccgcaggagctatctcaagattcatttgggtctcaggcatcctcagccccctcaatgacctccagtaagggagggcaagaagatatgaacctgagccttcagtcaagaccctccagcttgcctgatctatctggttcaatagatgacctccccatggggacagaaggagctctgagtcctggagtgagcacatcagggatttccagcagccaaggagagcagagtaatccagctcagtctcctttctctcctcatacctcccctcacctgcctggcatccgaggcccttccccgtcccctgttggctctcccgccagtgttgctcagtctcgctcaggaccactctcgcctgctgcagtgccaggcaaccagatgccacctcggccacccagtggccagtcggacagcatcatgcatccttccatgaaccaatcaagcattgcccaagatcgaggttatatgcagaggaacccccagatgccccagtacagttccccccagcccggctcagccttatctccgcgtcagccttccggaggacagatacacacaggcatgggctcctaccagcagaactccatggggagctatggtccccaggggggtcagtatggcccacaaggtggctaccccaggcagccaaactataatgccttgcccaatgccaactaccccagtgcaggcatggctggaggcataaaccccatgggtgccggaggtcaaatgcatggacagcctggcatcccaccttatggcacactccctccagggaggatgagtcacgcctccatgggcaaccggccttatggccctaacatggccaatatgccacctcaggttgggtcagggatgtgtcccccaccagggggcatgaaccggaaaacccaagaaactgctgtcgccatgcatgttgctgccaactctatccaaaacaggccgccaggctaccccaatatgaatcaagggggcatgatgggaactggacctccttatggacaagggattaatagtatggctggcatgatcaaccctcagggacccccatattccatgggtggaaccatggccaacaattctgcagggatggcagccagcccagagatgatgggccttggggatgtaaagttaactccagccaccaaaatgaacaacaaggcagatgggacacccaagacagaatccaaatccaagaaatccagttcttctactacaaccaatgagaagatcaccaagttgtatgagctgggtggtgagcctgagaggaagatgtgggtggaccgttatctggccttcactgaggagaaggccatgggcatgacaaatctgcctgctgtgggtaggaaacctctggacctctatcgcctctatgtgtctgtgaaggagattggtggattgactcaggtcaacaagaacaaaaaatggcgggaacttgcaaccaacctcaatgtgggcacatcaagcagtgctgccagctccttgaaaaagcagtatatccagtgtctctatgcctttgaatgcaagattgaacggggagaagaccctcccccagacatctttgcagctgctgattccaagaagtcccagcccaagatccagcctccctctcctgcgggatcaggatctatgcaggggccccagactccccagtcaaccagcagttccatggcagaaggaggagacttaaagccaccaactccagcatccacaccacacagtcagatccccccattgccaggcatgagcaggagcaattcagttgggatccaggatgcctttaatgatggaagtgactccacattccagaagcggaattccatgactccaaaccctgggtatcagcccagtatgaatacctctgacatgatggggcgcatgtcctatgagccaaataaggatccttatggcagcatgaggaaagctccagggagtgatcccttcatgtcctcagggcagggccccaacggcgggatgggtgacccctacagtcgtgctgccggccctgggctaggaaatgtggcgatgggaccacgacagcactatccctatggaggtccttatgacagagtgaggacggagcctggaatagggcctgagggaaacatgagcactggggccccacagccgaatctcatgccttccaacccagactcggggatgtattctcctagccgctaccccccgcagcagcagcagcagcagcagcaacgacatgattcctatggcaatcagttctccacccaaggcaccccttctggcagccccttccccagccagcagactacaatgtatcaacagcaacagcagaattacaagcggccaatggatggcacatatggccctcctgccaagcggcacgaaggggagatgtacagcgtgccatacagcactgggcaggggcagcctcagcagcagcagttgcccccagcccagccccagcctgccagccagcaacaagctgcccagccttcccctcagcaagatgtatacaaccagtatggcaatgcctatcctgccactgccacagctgctactgagcgccgaccagcaggcggcccccagaaccaatttccattccagtttggccgagaccgtgtctctgcaccccctggcaccaatgcccagcaaaacatgccaccacaaatgatgggcggccccatacaggcatcagctgaggttgctcagcaaggcaccatgtggcaggggcgtaatgacatgacctataattatgccaacaggcagagcacgggctctgccccccagggccccgcctatcatggcgtgaaccgaacagatgaaatgctgcacacagatcagagggccagccacgaaggctcgtggccttcccatggcacacgccagcccccatatggtccctctgcccctgtgccccccatgacaaggccccctccatctaactaccagcccccaccaagcatgcagaatcacattcctcaggtatccagccctgctcccctgccccggccaatggagaaccgcacctctcctagcaagtctccattcctgcactctgggatgaaaatgcagaaggcaggtcccccagtacctgcctcgcacatagcacctgcccctgtgcagccccccatgattcggcgggatatcaccttcccacctggctctgttgaagccacacagcctgtgttgaagcagaggaggcggctcacaatgaaagacattggaaccccggaggcatggcgggtaatgatgtccctcaagtctggtctcctggcagagagcacatgggcattagataccatcaacatcctgctgtatgatgacaacagcatcatgaccttcaacctcagtcagctcccagggttgctagagctccttgtagaatatttccgacgatgcctgattgagatctttggcattttaaaggagtatgaggtgggtgacccaggacagagaacgctactggatcctgggaggttcagcaaggtgtctagtccagctcccatggagggtggggaagaagaagaagaacttctaggtcctaaactagaagaggaagaagaagaggaagtagttgaaaatgatgaggagatagccttttcaggcaaggacaagccagcttcagagaatagtgaggagaagctgatcagtaagtttgacaagcttccagtaaagatcgtacagaagaatgatccatttgtggtggactgctcagataagcttgggcgtgtgcaggagtttgacagtggcctgctgcactggcggattggtgggggggacaccactgagcatatccagacccacttcgagagcaagacagagctgctgccttcccggcctcacgcaccctgcccaccagcccctcggaagcatgtgacaacagcagagggtacaccagggacaacagaccaggaggggcccccacctgatggacctccagaaaaacggatcacagccactatggatgacatgttgtctactcggtctagcaccttgaccgaggatggagctaagagttcagaggccatcaaggagagcagcaagtttccatttggcattagcccagcacagagccaccggaacatcaagatcctagaggacgaaccccacagtaaggatgagaccccactgtgtacccttctggactggcaggattctcttgccaagcgctgcgtctgtgtgtccaataccattcgaagcctgtcatttgtgccaggcaatgactttgagatgtccaaacacccagggctgctgctcatcctgggcaagctgatcctgctgcaccacaagcacccagaacggaagcaggcaccactaacttatgaaaaggaggaggaacaggaccaaggggtgagctgcaacaaagtggagtggtggtgggactgcttggagatgctccgggaaaacaccttggttacactcgccaacatctcggggcagttggacctatctccataccccgagagcatttgcctgcctgtcctggacggactcctacactgggcagtttgcccttcagctgaagcccaggaccccttttccaccctgggccccaatgccgtcctttccccgcagagactggtcttggaaaccctcagcaaactcagcatccaggacaacaatgtggacctgattctggccacaccccccttcagccgcctggagaagttgtatagcactatggtgcgcttcctcagtgaccgaaagaacccggtgtgccgggagatggctgtggtactgctggccaacctggctcagggggacagcctggcagctcgtgccattgcagtgcagaagggcagtatcggcaacctcctgggcttcctagaggacagccttgccgccacacagttccagcagagccaggccagcctcctccacatgcagaacccaccctttgagccaactagtgtggacatgatgcggcgggctgcccgcgcgctgcttgccttggccaaggtggacgagaaccactcagagtttactctgtacgaatcacggctgttggacatctcggtatcaccgttgatgaactcattggtttcacaagtcatttgtgatgtactgtttttgattggccagtcatgacagccgtgggacacctcccccccccgtgtgtgtgtgcgtgtgtggagaacttagaaactgactgttgccctttatttatgcaaaaccacctcagaatccagtttaccctgtgctgtccagcttctcccttgggaaaaagtctctcctgtttctctctcctccttccacctcccctccctccatcacctcacgcctttctgttccttgtcctcaccttactcccctcaggaccctaccccaccctctttgaaaagacaaagctctgcctacatagaagactttttttattttaaccaaagttactgttgtttacagtgagtttggggaaaaaaaataaaataaaaatggctttcccagtccttgcatcaacgggatgccacatttcataactgtttttaatggtaaaaaaaaaaaaaaaaaatacaaaaaaaaattctgaaggacaaaaaaggtgactgctgaactgtgtgtggtttattgttgtacattcacaatcttgcaggagccaagaagttcgcagttgtgaacagaccctgttcactggagaggcctgtgcagtagagtgtagaccctttcatgtactgtactgtacacctgatactgtaaacatactgtaataataatgtctcacatggaaacagaaaacgctgggtcagcagcaagctgtagtttttaaaaatgtttttagttaaacgttgaggagaaaaaaaaaaaaggcttttcccccaaagtatcatgtgtgaacctacaacaccctgacctctttctctcctccttgattgtatgaataaccctgagatcacctcttagaactggttttaacctttagctgcagcggctacgctgccacgtgtgtatatatatgacgttgtacattgcacatacccttggatccccacagtttggtcctcctcccagctacccctttatagtatgacgagttaacaagttggtgacctgcacaaagcgagacacagctatttaatctcttgccagatatcgcccctcttggtgcgatgctgtacaggtctctgtaaaaagtccttgctgtctcagcagccaatcaacttatagtttatttttttctgggtttttgttttgttttgttttctttctaatcgaggtgtgaaaaagttctaggttcagttgaagttctgatgaagaaacacaattgagattttttcagtgataaaatctgcatatttgtatttcaacaatgtagctaaaacttgatgtaaattcctcctttttttccttttttggcttaatgaatatcatttattcagtatgaaatctttatactatatgttccacgtgttaagaataaatgtacattaaatcttggtaagacttt

SEQ ID NO: 97 - DNA, 8585 bp, Homo sapiens
cagaaagcggagagtcacagcggggccaggccctggggagcggagcctccaccgcccccctcattcccaggcaagggcttggggggaatgagccgggagagccgggtcccgagcctacagagccgggagcagctgagccgccggcgcctcggccgccgccgccgcctcctcctcctccgccgccgccagcccggagcctgagccggcggggcgggggggagaggagcgagcgcagcgcagcagcggagccccgcgaggcccgcccgggcgggtggggagggcagcccgggggactgggccccggggcggggtgggagggggggagaagacgaagacagggccgggtctctccgcggacgagacagcggggatcatggccgcgcaggtcgcccccgccgccgccagcagcctgggcaacccgccgccgccgccgccctcggagctgaagaaagccgagcagcagcagcgggaggaggcggggggcgaggcggcggcggcggcagcggccgagcgcggggaaatgaaggcagccgccgggcaggaaagcgagggccccgccgtggggccgccgcagccgctgggaaaggagctgcaggacggggccgagagcaatgggggtggcggcggcggcggagccggcagcggcggcgggcccggcgcggagccggacctgaagaactcgaacgggaacgcgggccctaggcccgccctgaacaataacctcacggagccgcccggcggcggcggtggcggcagcagcgatggggtgggggcgcctcctcactcagccgcggccgccttgccgcccccagcctacggcttcgggcaaccctacggccggagcccgtctgccgtcgccgccgccgcggccgccgtcttccaccaacaacatggcggacaacaaagccctggcctggcagcgctgcagagcggcggcggcgggggcctggagccctacgcggggccccagcagaactctcacgaccacggcttccccaaccaccagtacaactcctactaccccaaccgcagcgcctaccccccgcccgccccggcctacgcgctgagctccccgagaggtggcactccgggctccggcgcggcggcggctgccggctccaagccgcctccctcctccagcgcctccgcctcctcgtcgtcttcgtccttcgctcagcagcgcttcggggccatggggggaggcggcccctccgcggccggcgggggaactccccagcccaccgccacccccaccctcaaccaactgctcacgtcgcccagctcggcccggggctaccagggctaccccgggggcgactacagtggcgggccccaggacgggggcgccggcaagggcccggcggacatggcctcgcagtgttggggggctgcggcggcggcagctgcggcggcggccgcctcgggaggggcccaacaaaggagccaccacgcgcccatgagccccgggagcagcggcggcggggggcagccgctcgcccggacccctcagccatccagtccaatggatcagatgggcaagatgagacctcagccatatggcgggactaacccatactcgcagcaacagggacctccgtcaggaccgcagcaaggacatgggtacccagggcagccatacgggtcccagaccccgcagcggtacccgatgaccatgcagggccgggcgcagagtgccatgggcggcctctcttatacacagcagattcctccttatggacaacaaggccccagcgggtatggtcaacagggccagactccatattacaaccagcaaagtcctcaccctcagcagcagcagccaccctactcccagcaaccaccgtcccagacccctcatgcccaaccttcgtatcagcagcagccacagtctcaaccaccacagctccagtcctctcagcctccatactcccagcagccatcccagcctccacatcagcagtccccggctccatacccctcccagcagtcgacgacacagcagcacccccagagccagcccccctactcacagccacaggctcagtctccttaccagcagcagcaacctcagcagccagcaccctcgacgctctcccagcaggctgcgtatcctcagccccagtctcagcagtcccagcaaactgcctattcccagcagcgcttccctccaccgcaggagctatctcaagattcatttgggtctcaggcatcctcagccccctcaatgacctccagtaagggagggcaagaagatatgaacctgagccttcagtcaagaccctccagcttgcctgatctatctggttcaatagatgacctccccatggggacagaaggagctctgagtcctggagtgagcacatcagggatttccagcagccaaggagagcagagtaatccagctcagtctcctttctctcctcatacctcccctcacctgcctggcatccgaggcccttccccgtcccctgttggctctcccgccagtgttgctcagtctcgctcaggaccactctcgcctgctgcagtgccaggcaaccagatgccacctcggccacccagtggccagtcggacagcatcatgcatccttccatgaaccaatcaagcattgcccaagatcgaggttatatgcagaggaacccccagatgccccagtacagttccccccagcccggctcagccttatctccgcgtcagccttccggaggacagatacacacaggcatgggctcctaccagcagaactccatggggagctatggtccccaggggggtcagtatggcccacaaggtggctaccccaggcagccaaactataatgccttgcccaatgccaactaccccagtgcaggcatggctggaggcataaaccccatgggtgccggaggtcaaatgcatggacagcctggcatcccaccttatggcacactccctccagggaggatgagtcacgcctccatgggcaaccggccttatggccctaacatggccaatatgccacctcaggttgggtcagggatgtgtcccccaccagggggcatgaaccggaaaacccaagaaactgctgtcgccatgcatgttgctgccaactctatccaaaacaggccgccaggctaccccaatatgaatcaagggggcatgatgggaactggacctccttatggacaagggattaatagtatggctggcatgatcaaccctcagggacccccatattccatgggtggaaccatggccaacaattctgcagggatggcagccagcccagagatgatgggccttggggatgtaaagttaactccagccaccaaaatgaacaacaaggcagatgggacacccaagacagaatccaaatccaagaaatccagttcttctactacaaccaatgagaagatcaccaagttgtatgagctgggtggtgagcctgagaggaagatgtgggtggaccgttatctggccttcactgaggagaaggccatgggcatgacaaatctgcctgctgtgggtaggaaacctctggacctctatcgcctctatgtgtctgtgaaggagattggtggattgactcaggtcaacaagaacaaaaaatggcgggaacttgcaaccaacctcaatgtgggcacatcaagcagtgctgccagctccttgaaaaagcagtatatccagtgtctctatgcctttgaatgcaagattgaacggggagaagaccctcccccagacatctttgcagctgctgattccaagaagtcccagcccaagatccagcctccctctcctgcgggatcaggatctatgcaggggccccagactccccagtcaaccagcagttccatggcagaaggaggagacttaaagccaccaactccagcatccacaccacacagtcagatccccccattgccaggcatgagcaggagcaattcagttgggatccaggatgcctttaatgatggaagtgactccacattccagaagcggaattccatgactccaaaccctgggtatcagcccagtatgaatacctctgacatgatggggcgcatgtcctatgagccaaataaggatccttatggcagcatgaggaaagctccagggagtgatcccttcatgtcctcagggcagggccccaacggcgggatgggtgacccctacagtcgtgctgccggccctgggctaggaaatgtggcgatgggaccacgacagcactatccctatggaggtccttatgacagagtgaggacggagcctggaatagggcctgagggaaacatgagcactggggccccacagccgaatctcatgccttccaacccagactcggggatgtattctcctagccgctaccccccgcagcagcagcagcagcagcagcaacgacatgattcctatggcaatcagttctccacccaaggcaccccttctggcagccccttccccagccagcagactacaatgtatcaacagcaacagcagaattacaagcggccaatggatggcacatatggccctcctgccaagcggcacgaaggggagatgtacagcgtgccatacagcactgggcaggggcagcctcagcagcagcagttgcccccagcccagccccagcctgccagccagcaacaagctgcccagccttcccctcagcaagatgtatacaaccagtatggcaatgcctatcctgccactgccacagctgctactgagcgccgaccagcaggcggcccccagaaccaatttccattccagtttggccgagaccgtgtctctgcaccccctggcaccaatgcccagcaaaacatgccaccacaaatgatgggcggccccatacaggcatcagctgaggttgctcagcaaggcaccatgtggcaggggcgtaatgacatgacctataattatgccaacaggcagagcacgggctctgccccccagggccccgcctatcatggcgtgaaccgaacagatgaaatgctgcacacagatcagagggccaaccccgaaggctcgtggccttcccatggcacacgccagcccccatatggtccctctgcccctgtgccccccatgacaaggccccctccatctaactaccagcccccaccaagcatgcagaatcacattcctcaggtatccagccctgctcccctgccccggccaatggagaaccgcacctctcctagcaagtctccattcctgcactctgggatgaaaatgcagaaggcaggtcccccagtacctgcctcgcacatagcacctgcccctgtgcagccccccatgattcggcgggatatcaccttcccacctggctctgttgaagccacacagcctgtgttgaagcagaggaggcggctcacaatgaaagacattggaaccccggaggcatggcgggtaatgatgtccctcaagtctggtctcctggcagagagcacatgggcattagataccatcaacatcctgctgtatgatgacaacagcatcatgaccttcaacctcagtcagctcccagggttgctagagctccttgtagaatatttccgacgatgcctgattgagatctttggcattttaaaggagtatgaggtgggtgacccaggacagagaacgctactggatcctgggaggttcagcaaggtgtctagtccagctcccatggagggtggggaagaagaagaagaacttctaggtcctaaactagaagaggaagaagaagaggaagtagttgaaaatgatgaggagatagccttttcaggcaaggacaagccagcttcagagaatagtgaggagaagctgatcagtaagtttgacaagcttccagtaaagatcgtacagaagaatgatccatttgtggtggactgctcagataagcttgggcgtgtgcaggagtttgacagtggcctgctgcactggcggattggtgggggggacaccactgagcatatccagacccacttcgagagcaagacagagctgctgccttcccggcctcacgcaccctgcccaccagcccctcggaagcatgtgacaacagcagagggtacaccagggacaacagaccaggaggggcccccacctgatggacctccagaaaaacggatcacagccactatggatgacatgttgtctactcggtctagcaccttgaccgaggatggagctaagagttcagaggccatcaaggagagcagcaagtttccatttggcattagcccagcacagagccaccggaacatcaagatcctagaggacgaaccccacagtaaggatgagaccccactgtgtacccttctggactggcaggattctcttgccaagcgctgcgtctgtgtgtccaataccattcgaagcctgtcatttgtgccaggcaatgactttgagatgtccaaacacccagggctgctgctcatcctgggcaagctgatcctgctgcaccacaagcacccagaacggaagcaggcaccactaacttatgaaaaggaggaggaacaggaccaaggggtgagctgcaacaaagtggagtggtggtgggactgcttggagatgctccgggaaaacaccttggttacactcgccaacatctcggggcagttggacctatctccataccccgagagcatttgcctgcctgtcctggacggactcctacactgggcagtttgcccttcagctgaagcccaggaccccttttccaccctgggccccaatgccgtcctttccccgcagagactggtcttggaaaccctcagcaaactcagcatccaggacaacaatgtggacctgattctggccacaccccccttcagccgcctggagaagttgtatagcactatggtgcgcttcctcagtgaccgaaagaacccggtgtgccgggagatggctgtggtactgctggccaacctggctcagggggacagcctggcagctcgtgccattgcagtgcagaagggcagtatcggcaacctcctgggcttcctagaggacagccttgccgccacacagttccagcagagccaggccagcctcctccacatgcagaacccaccctttgagccaactagtgtggacatgatgcggcgggctgcccgcgcgctgcttgccttggccaaggtggacgagaaccactcagagtttactctgtacgaatcacggctgttggacatctcggtatcaccgttgatgaactcattggtttcacaagtcatttgtgatgtactgtttttgattggccagtcatgacagccgtgggacacctcccccccccgtgtgtgtgtgcgtgtgtggagaacttagaaactgactgttgccctttatttatgcaaaaccacctcagaatccagtttaccctgtgctgtccagcttctcccttgggaaaaagtctctcctgtttctctctcctccttccacctcccctccctccatcacctcacgcctttctgttccttgtcctcaccttactcccctcaggaccctaccccaccctctttgaaaagacaaagctctgcctacatagaagactttttttattttaaccaaagttactgttgtttacagtgagtttggggaaaaaaaataaaataaaaatggctttcccagtccttgcatcaacgggatgccacatttcataactgtttttaatggtaaaaaaaaaaaaaaaaaatacaaaaaaaaattctgaaggacaaaaaaggtgactgctgaactgtgtgtggtttattgttgtacattcacaatcttgcaggagccaagaagttcgcagttgtgaacagaccctgttcactggagaggcctgtgcagtagagtgtagaccctttcatgtactgtactgtacacctgatactgtaaacatactgtaataataatgtctcacatggaaacagaaaacgctgggtcagcagcaagctgtagtttttaaaaatgtttttagttaaacgttgaggagaaaaaaaaaaaaggcttttcccccaaagtatcatgtgtgaacctacaacaccctgacctctttctctcctccttgattgtatgaataaccctgagatcacctcttagaactggttttaacctttagctgcagcggctacgctgccacgtgtgtatatatatgacgttgtacattgcacatacccttggatccccacagtttggtcctcctcccagctacccctttatagtatgacgagttaacaagttggtgacctgcacaaagcgagacacagctatttaatctcttgccagatatcgcccctcttggtgcgatgctgtacaggtctctgtaaaaagtccttgctgtctcagcagccaatcaacttatagtttatttttttctgggtttttgttttgttttgttttctttctaatcgaggtgtgaaaaagttctaggttcagttgaagttctgatgaagaaacacaattgagattttttcagtgataaaatctgcatatttgtatttcaacaatgtagctaaaacttgatgtaaattcctcctttttttccttttttggcttaatgaatatcatttattcagtatgaaatctttatactatatgttccacgtgttaagaataaatgtacattaaatcttggtaagacttt

SEQ ID NO: 98 - DNA, 8585 bp, Homo sapiens
cagaaagcggagagtcacagcggggccaggccctggggagcggagcctccaccgcccccctcattcccaggcaagggcttggggggaatgagccgggagagccgggtcccgagcctacagagccgggagcagctgagccgccggcgcctcggccgccgccgccgcctcctcctcctccgccgccgccagcccggagcctgagccggcggggcgggggggagaggagcgagcgcagcgcagcagcggagccccgcgaggcccgcccgggcgggtggggagggcagcccgggggactgggccccggggcggggtgggagggggggagaagacgaagacagggccgggtctctccgcggacgagacagcggggatcatggccgcgcaggtcgcccccgccgccgccagcagcctgggcaacccgccgccgccgccgccctcggagctgaagaaagccgagcagcagcagcgggaggaggcggggggcgaggcggcggcggcggcagcggccgagcgcggggaaatgaaggcagccgccgggcaggaaagcgagggccccgccgtggggccgccgcagccgctgggaaaggagctgcaggacggggccgagagcaatgggggtggcggcggcggcggagccggcagcggcggcgggcccggcgcggagccggacctgaagaactcgaacgggaacgcgggccctaggcccgccctgaacaataacctcacggagccgcccggcggcggcggtggcggcagcagcgatggggtgggggcgcctcctcactcagccgcggccgccttgccgcccccagcctacggcttcgggcaaccctacggccggagcccgtctgccgtcgccgccgccgcggccgccgtcttccaccaacaacatggcggacaacaaagccctggcctggcagcgctgcagagcggcggcggcgggggcctggagccctacgcggggccccagcagaactctcacgaccacggcttccccaaccaccagtacaactcctactaccccaaccgcagcgcctaccccccgcccgccccggcctacgcgctgagctccccgagaggtggcactccgggctccggcgcggcggcggctgccggctccaagccgcctccctcctccagcgcctccgcctcctcgtcgtcttcgtccttcgctcagcagcgcttcggggccatggggggaggcggcccctccgcggccggcgggggaactccccagcccaccgccacccccaccctcaaccaactgctcacgtcgcccagctcggcccggggctaccagggctaccccgggggcgactacagtggcgggccccaggacgggggcgccggcaagggcccggcggacatggcctcgcagtgttggggggctgcggcggcggcagctgcggcggcggccgcctcgggaggggcccaacaaaggagccaccacgcgcccatgagccccgggagcagcggcggcggggggcagccgctcgcccggacccctcagccatccagtccaatggatcagatgggcaagatgagacctcagccatatggcgggactaacccatactcgcagcaacagggacctccgtcaggaccgcagcaaggacatgggtacccagggcagccatacgggtcccagaccccgcagcggtacccgatgaccatgcagggccgggcgcagagtgccatgggcggcctctcttatacacagcagattcctccttatggacaacaaggccccagcgggtatggtcaacagggccagactccatattacaaccagcaaagtcctcaccctcagcagcagcagccaccctactcccagcaaccaccgtcccagacccctcatgcccaaccttcgtatcagcagcagccacagtctcaaccaccacagctccagtcctctcagcctccatactcccagcagccatcccagcctccacatcagcagtccccggctccatacccctcccagcagtcgacgacacagcagcacccccagagccagcccccctactcacagccacaggctcagtctccttaccagcagcagcaacctcagcagccagcaccctcgacgctctcccagcaggctgcgtatcctcagccccagtctcagcagtcccagcaaactgcctattcccagcagcgcttccctccaccgcaggagctatctcaagattcatttgggtctcaggcatcctcagccccctcaatgacctccagtaagggagggcaagaagatatgaacctgagccttcagtcaagaccctccagcttgcctgatctatctggttcaatagatgacctccccatggggacagaaggagctctgagtcctggagtgagcacatcagggatttccagcagccaaggagagcagagtaatccagctcagtctcctttctctcctcatacctcccctcacctgcctggcatccgaggcccttccccgtcccctgttggctctcccgccagtgttgctcagtctcgctcaggaccactctcgcctgctgcagtgccaggcaaccagatgccacctcggccacccagtggccagtcggacagcatcatgcatccttccatgaaccaatcaagcattgcccaagatcgaggttatatgcagaggaacccccagatgccccagtacagttccccccagcccggctcagccttatctccgcgtcagccttccggaggacagatacacacaggcatgggctcctaccagcagaactccatggggagctatggtccccaggggggtcagtatggcccacaaggtggctaccccaggcagccaaactataatgccttgcccaatgccaactaccccagtgcaggcatggctggaggcataaaccccatgggtgccggaggtcaaatgcatggacagcctggcatcccaccttatggcacactccctccagggaggatgagtcacgcctccatgggcaaccggccttatggccctaacatggccaatatgccacctcaggttgggtcagggatgtgtcccccaccagggggcatgaaccggaaaacccaagaaactgctgtcgccatgcatgttgctgccaactctatccaaaacaggccgccaggctaccccaatatgaatcaagggggcatgatgggaactggacctccttatggacaagggattaatagtatggctggcatgatcaaccctcagggacccccatattccatgggtggaaccatggccaacaattctgcagggatggcagccagcccagagatgatgggccttggggatgtaaagttaactccagccaccaaaatgaacaacaaggcagatgggacacccaagacagaatccaaatccaagaaatccagttcttctactacaaccaatgagaagatcaccaagttgtatgagctgggtggtgagcctgagaggaagatgtgggtggaccgttatctggccttcactgaggagaaggccatgggcatgacaaatctgcctgctgtgggtaggaaacctctggacctctatcgcctctatgtgtctgtgaaggagattggtggattgactcaggtcaacaagaacaaaaaatggcgggaacttgcaaccaacctcaatgtgggcacatcaagcagtgctgccagctccttgaaaaagcagtatatccagtgtctctatgcctttgaatgcaagattgaacggggagaagaccctcccccagacatctttgcagctgctgattccaagaagtcccagcccaagatccagcctccctctcctgcgggatcaggatctatgcaggggccccagactccccagtcaaccagcagttccatggcagaaggaggagacttaaagccaccaactccagcatccacaccacacagtcagatccccccattgccaggcatgagcaggagcaattcagttgggatccaggatgcctttaatgatggaagtgactccacattccagaagcggaattccatgactccaaaccctgggtatcagcccagtatgaatacctctgacatgatggggcgcatgtcctatgagccaaataaggatccttatggcagcatgaggaaagctccagggagtgatcccttcatgtcctcagggcagggccccaacggcgggatgggtgacccctacagtcgtgctgccggccctgggctaggaaatgtggcgatgggaccacgacagcactatccctatggaggtccttatgacagagtgaggacggagcctggaatagggcctgagggaaacatgagcactggggccccacagccgaatctcatgccttccaacccagactcggggatgtattctcctagccgctaccccccgcagcagcagcagcagcagcagcaacgacatgattcctatggcaatcagttctccacccaaggcaccccttctggcagccccttccccagccagcagactacaatgtatcaacagcaacagcagaattacaagcggccaatggatggcacatatggccctcctgccaagcggcacgaaggggagatgtacagcgtgccatacagcactgggcaggggcagcctcagcagcagcagttgcccccagcccagccccagcctgccagccagcaacaagctgcccagccttcccctcagcaagatgtatacaaccagtatggcaatgcctatcctgccactgccacagctgctactgagcgccgaccagcaggcggcccccagaaccaatttccattccagtttggccgagaccgtgtctctgcaccccctggcaccaatgcccagcaaaacatgccaccacaaatgatgggcggccccatacaggcatcagctgaggttgctcagcaaggcaccatgtggcaggggcgtaatgacatgacctataattatgccaacaggcagagcacgggctctgccccccagggccccgcctatcatggcgtgaaccgaacagatgaaatgctgcacacagatcagagggccaaccacgaaggctcgtggccttcccatggcacacgccagcccccatatggtccctctgcccctgtgccccccatgacaaggccccctccatctaactaccagcccccaccaagcatgcagaatcacattcctcaggtatccagccctgctcccctgccccggccaatggagaaccgcacctctcctagcaagtctccattcctgcactctgggatgaaaatgcagaaggcaggtcccccagtacctgcctcgcacatagcacctgcccctgtgcagccccccatgattcggcgggatatcaccttcccacctggctctgttgaagccacacagcctgtgttgaagcagaggaggcggctcacaatgaaagacattggaaccccggaggcatggcgggtaatgatgtccctcaagtctggtctcctggcagagagcacatgggcattagataccatcaacatcctgctgtatgatgacaacagcatcatgaccttcaacctcagtcagctcccagggttgctagagctccttgtagaatatttccgacgatgcctgattgagatctttggcattttaaaggagtatgaggtgggtgacccaggacagagaacgctactggatcctgggaggttcagcaaggtgtctagtccagctcccatggagggtggggaagaagaagaagaacttctaggtcctaaactagaagaggaagaagaagaggaagtagttgaaaatgatgaggagatagccttttcaggcaaggacaagccagcttcagagaatagtgaggagaagctgatcagtaagtttgacaagcttccagtaaagatcgtacagaagaatgatccatttgtggtggactgctcagataagcttgggcgtgtgcaggagtttgacagtggcctgctgcactggcggattggtgggggggacaccactgagcatatccagacccacttcgagagcaagacagagctgctgccttcccggcctcacgcaccctgcccaccagcccctcggaagcatgtgacaacagcagagggtacaccagggacaacagaccaggaggggcccccacctgatggacctccagaaaaacggatcacagccactatggatgacatgttgtctactcggtctagcaccttgaccgaggatggagctaagagttcagaggccatcaaggagagcagcaagtttccatttggcattagcccagcacagagccaccggaacatcaagatcctagaggacgaaccccacagtaaggatgagaccccactgtgtacccttctggactggcaggattctcttgccaagcgctgcgtctgtgtgtccaataccatttgaagcctgtcatttgtgccaggcaatgactttgagatgtccaaacacccagggctgctgctcatcctgggcaagctgatcctgctgcaccacaagcacccagaacggaagcaggcaccactaacttatgaaaaggaggaggaacaggaccaaggggtgagctgcaacaaagtggagtggtggtgggactgcttggagatgctccgggaaaacaccttggttacactcgccaacatctcggggcagttggacctatctccataccccgagagcatttgcctgcctgtcctggacggactcctacactgggcagtttgcccttcagctgaagcccaggaccccttttccaccctgggccccaatgccgtcctttccccgcagagactggtcttggaaaccctcagcaaactcagcatccaggacaacaatgtggacctgattctggccacaccccccttcagccgcctggagaagttgtatagcactatggtgcgcttcctcagtgaccgaaagaacccggtgtgccgggagatggctgtggtactgctggccaacctggctcagggggacagcctggcagctcgtgccattgcagtgcagaagggcagtatcggcaacctcctgggcttcctagaggacagccttgccgccacacagttccagcagagccaggccagcctcctccacatgcagaacccaccctttgagccaactagtgtggacatgatgcggcgggctgcccgcgcgctgcttgccttggccaaggtggacgagaaccactcagagtttactctgtacgaatcacggctgttggacatctcggtatcaccgttgatgaactcattggtttcacaagtcatttgtgatgtactgtttttgattggccagtcatgacagccgtgggacacctcccccccccgtgtgtgtgtgcgtgtgtggagaacttagaaactgactgttgccctttatttatgcaaaaccacctcagaatccagtttaccctgtgctgtccagcttctcccttgggaaaaagtctctcctgtttctctctcctccttccacctcccctccctccatcacctcacgcctttctgttccttgtcctcaccttactcccctcaggaccctaccccaccctctttgaaaagacaaagctctgcctacatagaagactttttttattttaaccaaagttactgttgtttacagtgagtttggggaaaaaaaataaaataaaaatggctttcccagtccttgcatcaacgggatgccacatttcataactgtttttaatggtaaaaaaaaaaaaaaaaaatacaaaaaaaaattctgaaggacaaaaaaggtgactgctgaactgtgtgtggtttattgttgtacattcacaatcttgcaggagccaagaagttcgcagttgtgaacagaccctgttcactggagaggcctgtgcagtagagtgtagaccctttcatgtactgtactgtacacctgatactgtaaacatactgtaataataatgtctcacatggaaacagaaaacgctgggtcagcagcaagctgtagtttttaaaaatgtttttagttaaacgttgaggagaaaaaaaaaaaaggcttttcccccaaagtatcatgtgtgaacctacaacaccctgacctctttctctcctccttgattgtatgaataaccctgagatcacctcttagaactggttttaacctttagctgcagcggctacgctgccacgtgtgtatatatatgacgttgtacattgcacatacccttggatccccacagtttggtcctcctcccagctacccctttatagtatgacgagttaacaagttggtgacctgcacaaagcgagacacagctatttaatctcttgccagatatcgcccctcttggtgcgatgctgtacaggtctctgtaaaaagtccttgctgtctcagcagccaatcaacttatagtttatttttttctgggtttttgttttgttttgttttctttctaatcgaggtgtgaaaaagttctaggttcagttgaagttctgatgaagaaacacaattgagattttttcagtgataaaatctgcatatttgtatttcaacaatgtagctaaaacttgatgtaaattcctcctttttttccttttttggcttaatgaatatcatttattcagtatgaaatctttatactatatgttccacgtgttaagaataaatgtacattaaatcttggtaagacttt

SEQ ID NO: 99 - DNA, 8585 bp, Homo sapiens
cagaaagcggagagtcacagcggggccaggccctggggagcggagcctccaccgcccccctcattcccaggcaagggcttggggggaatgagccgggagagccgggtcccgagcctacagagccgggagcagctgagccgccggcgcctcggccgccgccgccgcctcctcctcctccgccgccgccagcccggagcctgagccggcggggcgggggggagaggagcgagcgcagcgcagcagcggagccccgcgaggcccgcccgggcgggtggggagggcagcccgggggactgggccccggggcggggtgggagggggggagaagacgaagacagggccgggtctctccgcggacgagacagcggggatcatggccgcgcaggtcgcccccgccgccgccagcagcctgggcaacccgccgccgccgccgccctcggagctgaagaaagccgagcagcagcagcgggaggaggcggggggcgaggcggcggcggcggcagcggccgagcgcggggaaatgaaggcagccgccgggcaggaaagcgagggccccgccgtggggccgccgcagccgctgggaaaggagctgcaggacggggccgagagcaatgggggtggcggcggcggcggagccggcagcggcggcgggcccggcgcggagccggacctgaagaactcgaacgggaacgcgggccctaggcccgccctgaacaataacctcacggagccgcccggcggcggcggtggcggcagcagcgatggggtgggggcgcctcctcactcagccgcggccgccttgccgcccccagcctacggcttcgggcaaccctacggccggagcccgtctgccgtcgccgccgccgcggccgccgtcttccaccaacaacatggcggacaacaaagccctggcctggcagcgctgcagagcggcggcggcgggggcctggagccctacgcggggccccagcagaactctcacgaccacggcttccccaaccaccagtacaactcctactaccccaaccgcagcgcctaccccccgcccgccccggcctacgcgctgagctccccgagaggtggcactccgggctccggcgcggcggcggctgccggctccaagccgcctccctcctccagcgcctccgcctcctcgtcgtcttcgtccttcgctcagcagcgcttcggggccatggggggaggcggcccctccgcggccggcgggggaactccccagcccaccgccacccccaccctcaaccaactgctcacgtcgcccagctcggcccggggctaccagggctaccccgggggcgactacagtggcgggccccaggacgggggcgccggcaagggcccggcggacatggcctcgcagtgttggggggctgcggcggcggcagctgcggcggcggccgcctcgggaggggcccaacaaaggagccaccacgcgcccatgagccccgggagcagcggcggcggggggcagccgctcgcccggacccctcagccatccagtccaatggatcagatgggcaagatgagacctcagccatatggcgggactaacccatactcgcagcaacagggacctccgtcaggaccgcagcaaggacatgggtacccagggcagccatacgggtcccagaccccgcagcggtacccgatgaccatgcagggccgggcgcagagtgccatgggcggcctctcttatacacagcagattcctccttatggacaacaaggccccagcgggtatggtcaacagggccagactccatattacaaccagcaaagtcctcaccctcagcagcagcagccaccctactcccagcaaccaccgtcccagacccctcatgcccaaccttcgtatcagcagcagccacagtctcaaccaccacagctccagtcctctcagcctccatactcccagcagccatcccagcctccacatcagcagtccccggctccatacccctcccagcagtcgacgacacagcagcacccccagagccagcccccctactcacagccacaggctcagtctccttaccagcagtagcaacctcagcagccagcaccctcgacgctctcccagcaggctgcgtatcctcagccccagtctcagcagtcccagcaaactgcctattcccagcagcgcttccctccaccgcaggagctatctcaagattcatttgggtctcaggcatcctcagccccctcaatgacctccagtaagggagggcaagaagatatgaacctgagccttcagtcaagaccctccagcttgcctgatctatctggttcaatagatgacctccccatggggacagaaggagctctgagtcctggagtgagcacatcagggatttccagcagccaaggagagcagagtaatccagctcagtctcctttctctcctcatacctcccctcacctgcctggcatccgaggcccttccccgtcccctgttggctctcccgccagtgttgctcagtctcgctcaggaccactctcgcctgctgcagtgccaggcaaccagatgccacctcggccacccagtggccagtcggacagcatcatgcatccttccatgaaccaatcaagcattgcccaagatcgaggttatatgcagaggaacccccagatgccccagtacagttccccccagcccggctcagccttatctccgcgtcagccttccggaggacagatacacacaggcatgggctcctaccagcagaactccatggggagctatggtccccaggggggtcagtatggcccacaaggtggctaccccaggcagccaaactataatgccttgcccaatgccaactaccccagtgcaggcatggctggaggcataaaccccatgggtgccggaggtcaaatgcatggacagcctggcatcccaccttatggcacactccctccagggaggatgagtcacgcctccatgggcaaccggccttatggccctaacatggccaatatgccacctcaggttgggtcagggatgtgtcccccaccagggggcatgaaccggaaaacccaagaaactgctgtcgccatgcatgttgctgccaactctatccaaaacaggccgccaggctaccccaatatgaatcaagggggcatgatgggaactggacctccttatggacaagggattaatagtatggctggcatgatcaaccctcagggacccccatattccatgggtggaaccatggccaacaattctgcagggatggcagccagcccagagatgatgggccttggggatgtaaagttaactccagccaccaaaatgaacaacaaggcagatgggacacccaagacagaatccaaatccaagaaatccagttcttctactacaaccaatgagaagatcaccaagttgtatgagctgggtggtgagcctgagaggaagatgtgggtggaccgttatctggccttcactgaggagaaggccatgggcatgacaaatctgcctgctgtgggtaggaaacctctggacctctatcgcctctatgtgtctgtgaaggagattggtggattgactcaggtcaacaagaacaaaaaatggcgggaacttgcaaccaacctcaatgtgggcacatcaagcagtgctgccagctccttgaaaaagcagtatatccagtgtctctatgcctttgaatgcaagattgaacggggagaagaccctcccccagacatctttgcagctgctgattccaagaagtcccagcccaagatccagcctccctctcctgcgggatcaggatctatgcaggggccccagactccccagtcaaccagcagttccatggcagaaggaggagacttaaagccaccaactccagcatccacaccacacagtcagatccccccattgccaggcatgagcaggagcaattcagttgggatccaggatgcctttaatgatggaagtgactccacattccagaagcggaattccatgactccaaaccctgggtatcagcccagtatgaatacctctgacatgatggggcgcatgtcctatgagccaaataaggatccttatggcagcatgaggaaagctccagggagtgatcccttcatgtcctcagggcagggccccaacggcgggatgggtgacccctacagtcgtgctgccggccctgggctaggaaatgtggcgatgggaccacgacagcactatccctatggaggtccttatgacagagtgaggacggagcctggaatagggcctgagggaaacatgagcactggggccccacagccgaatctcatgccttccaacccagactcggggatgtattctcctagccgctaccccccgcagcagcagcagcagcagcagcaacgacatgattcctatggcaatcagttctccacccaaggcaccccttctggcagccccttccccagccagcagactacaatgtatcaacagcaacagcagaattacaagcggccaatggatggcacatatggccctcctgccaagcggcacgaaggggagatgtacagcgtgccatacagcactgggcaggggcagcctcagcagcagcagttgcccccagcccagccccagcctgccagccagcaacaagctgcccagccttcccctcagcaagatgtatacaaccagtatggcaatgcctatcctgccactgccacagctgctactgagcgccgaccagcaggcggcccccagaaccaatttccattccagtttggccgagaccgtgtctctgcaccccctggcaccaatgcccagcaaaacatgccaccacaaatgatgggcggccccatacaggcatcagctgaggttgctcagcaaggcaccatgtggcaggggcgtaatgacatgacctataattatgccaacaggcagagcacgggctctgccccccagggccccgcctatcatggcgtgaaccgaacagatgaaatgctgcacacagatcagagggccaaccacgaaggctcgtggccttcccatggcacacgccagcccccatatggtccctctgcccctgtgccccccatgacaaggccccctccatctaactaccagcccccaccaagcatgcagaatcacattcctcaggtatccagccctgctcccctgccccggccaatggagaaccgcacctctcctagcaagtctccattcctgcactctgggatgaaaatgcagaaggcaggtcccccagtacctgcctcgcacatagcacctgcccctgtgcagccccccatgattcggcgggatatcaccttcccacctggctctgttgaagccacacagcctgtgttgaagcagaggaggcggctcacaatgaaagacattggaaccccggaggcatggcgggtaatgatgtccctcaagtctggtctcctggcagagagcacatgggcattagataccatcaacatcctgctgtatgatgacaacagcatcatgaccttcaacctcagtcagctcccagggttgctagagctccttgtagaatatttccgacgatgcctgattgagatctttggcattttaaaggagtatgaggtgggtgacccaggacagagaacgctactggatcctgggaggttcagcaaggtgtctagtccagctcccatggagggtggggaagaagaagaagaacttctaggtcctaaactagaagaggaagaagaagaggaagtagttgaaaatgatgaggagatagccttttcaggcaaggacaagccagcttcagagaatagtgaggagaagctgatcagtaagtttgacaagcttccagtaaagatcgtacagaagaatgatccatttgtggtggactgctcagataagcttgggcgtgtgcaggagtttgacagtggcctgctgcactggcggattggtgggggggacaccactgagcatatccagacccacttcgagagcaagacagagctgctgccttcccggcctcacgcaccctgcccaccagcccctcggaagcatgtgacaacagcagagggtacaccagggacaacagaccaggaggggcccccacctgatggacctccagaaaaacggatcacagccactatggatgacatgttgtctactcggtctagcaccttgaccgaggatggagctaagagttcagaggccatcaaggagagcagcaagtttccatttggcattagcccagcacagagccaccggaacatcaagatcctagaggacgaaccccacagtaaggatgagaccccactgtgtacccttctggactggcaggattctcttgccaagcgctgcgtctgtgtgtccaataccattcgaagcctgtcatttgtgccaggcaatgactttgagatgtccaaacacccagggctgctgctcatcctgggcaagctgatcctgctgcaccacaagcacccagaacggaagcaggcaccactaacttatgaaaaggaggaggaacaggaccaaggggtgagctgcaacaaagtggagtggtggtgggactgcttggagatgctccgggaaaacaccttggttacactcgccaacatctcggggcagttggacctatctccataccccgagagcatttgcctgcctgtcctggacggactcctacactgggcagtttgcccttcagctgaagcccaggaccccttttccaccctgggccccaatgccgtcctttccccgcagagactggtcttggaaaccctcagcaaactcagcatccaggacaacaatgtggacctgattctggccacaccccccttcagccgcctggagaagttgtatagcactatggtgcgcttcctcagtgaccgaaagaacccggtgtgccgggagatggctgtggtactgctggccaacctggctcagggggacagcctggcagctcgtgccattgcagtgcagaagggcagtatcggcaacctcctgggcttcctagaggacagccttgccgccacacagttccagcagagccaggccagcctcctccacatgcagaacccaccctttgagccaactagtgtggacatgatgcggcgggctgcccgcgcgctgcttgccttggccaaggtggacgagaaccactcagagtttactctgtacgaatcacggctgttggacatctcggtatcaccgttgatgaactcattggtttcacaagtcatttgtgatgtactgtttttgattggccagtcatgacagccgtgggacacctcccccccccgtgtgtgtgtgcgtgtgtggagaacttagaaactgactgttgccctttatttatgcaaaaccacctcagaatccagtttaccctgtgctgtccagcttctcccttgggaaaaagtctctcctgtttctctctcctccttccacctcccctccctccatcacctcacgcctttctgttccttgtcctcaccttactcccctcaggaccctaccccaccctctttgaaaagacaaagctctgcctacatagaagactttttttattttaaccaaagttactgttgtttacagtgagtttggggaaaaaaaataaaataaaaatggctttcccagtccttgcatcaacgggatgccacatttcataactgtttttaatggtaaaaaaaaaaaaaaaaaatacaaaaaaaaattctgaaggacaaaaaaggtgactgctgaactgtgtgtggtttattgttgtacattcacaatcttgcaggagccaagaagttcgcagttgtgaacagaccctgttcactggagaggcctgtgcagtagagtgtagaccctttcatgtactgtactgtacacctgatactgtaaacatactgtaataataatgtctcacatggaaacagaaaacgctgggtcagcagcaagctgtagtttttaaaaatgtttttagttaaacgttgaggagaaaaaaaaaaaaggcttttcccccaaagtatcatgtgtgaacctacaacaccctgacctctttctctcctccttgattgtatgaataaccctgagatcacctcttagaactggttttaacctttagctgcagcggctacgctgccacgtgtgtatatatatgacgttgtacattgcacatacccttggatccccacagtttggtcctcctcccagctacccctttatagtatgacgagttaacaagttggtgacctgcacaaagcgagacacagctatttaatctcttgccagatatcgcccctcttggtgcgatgctgtacaggtctctgtaaaaagtccttgctgtctcagcagccaatcaacttatagtttatttttttctgggtttttgttttgttttgttttctttctaatcgaggtgtgaaaaagttctaggttcagttgaagttctgatgaagaaacacaattgagattttttcagtgataaaatctgcatatttgtatttcaacaatgtagctaaaacttgatgtaaattcctcctttttttccttttttggcttaatgaatatcatttattcagtatgaaatctttatactatatgttccacgtgttaagaataaatgtacattaaatcttggtaagacttt

SEQ ID NO: 100 - DNA, 8584 bp, Homo sapiens
cagaaagcggagagtcacagcggggccaggccctggggagcggagcctccaccgcccccctcattcccaggcaagggcttggggggaatgagccgggagagccgggtcccgagcctacagagccgggagcagctgagccgccggcgcctcggccgccgccgccgcctcctcctcctccgccgccgccagcccggagcctgagccggcggggcgggggggagaggagcgagcgcagcgcagcagcggagccccgcgaggcccgcccgggcgggtggggagggcagcccgggggactgggccccggggcggggtgggagggggggagaagacgaagacagggccgggtctctccgcggacgagacagcggggatcatggccgcgcaggtcgcccccgccgccgccagcagcctgggcaacccgccgccgccgccgccctcggagctgaagaaagccgagcagcagcagcgggaggaggcggggggcgaggcggcggcggcggcagcggccgagcgcggggaaatgaaggcagccgccgggcaggaaagcgagggccccgccgtggggccgccgcagccgctgggaaaggagctgcaggacggggccgagagcaatgggggtggcggcggcggcggagccggcagcggcggcgggcccggcgcggagccggacctgaagaactcgaacgggaacgcgggccctaggcccgccctgaacaataacctcacggagccgcccggcggcggcggtggcggcagcagcgatggggtgggggcgcctcctcactcagccgcggccgccttgccgcccccagcctacggcttcgggcaaccctacggccggagcccgtctgccgtcgccgccgccgcggccgccgtcttccaccaacaacatggcggacaacaaagccctggcctggcagcgctgcagagcggcggcggcgggggcctggagccctacgcggggccccagcagaactctcacgaccacggcttccccaaccaccagtacaactcctactaccccaaccgcagcgcctaccccccgcccgccccggcctacgcgctgagctccccgagaggtggcactccgggctccggcgcggcggcggctgccggctccaagccgcctccctcctccagcgcctccgcctcctcgtcgtcttcgtccttcgctcagcagcgcttcggggccatggggggaggcggcccctccgcggccggcgggggaactccccagcccaccgccacccccaccctcaaccaactgctcacgtcgcccagctcggcccggggctaccagggctaccccgggggcgactacagtggcgggccccaggacgggggcgccggcaagggcccggcggacatggcctcgcagtgttggggggctgcggcggcggcagctgcggcggcggccgcctcgggaggggcccaacaaaggagccaccacgcgcccatgagccccgggagcagcggcggcggggggcagccgctcgcccggacccctcagccatccagtccaatggatcagatgggcaagatgagacctcagccatatggcgggactaacccatactcgcagcaacagggacctccgtcaggaccgcagcaaggacatgggtacccagggcagccatacgggtcccagaccccgcagcggtacccgatgaccatgcagggccgggcgcagagtgccatgggcggcctctcttatacacagcagattcctccttatggacaacaaggccccagcgggtatggtcaacagggccagactccatattacaaccagcaaagtcctcaccctcagcagcagcagccaccctactcccagcaaccaccgtcccagacccctcatgcccaaccttcgtatcagcagcagccacagtctcaaccaccacagctccagtcctctcagcctccatactcccagcagccatcccagcctccacatcagcagtccccggctccatacccctcccagcagtcgacgacacagcagcacccccagagccagcccccctactcacagccacaggctcagtctccttaccagcagcagcaacctcagcagccagcaccctcgacgctctcccagcaggctgcgtatcctcagccccagtctcagcagtcccagcaaactgcctattcccagcagcgcttccctccaccgcaggagctatctcaagattcatttgggtctcaggcatcctcagccccctcaatgacctccagtaagggagggcaagaagatatgaacctgagccttcagtcaagaccctccagcttgcctgatctatctggttcaatagatgacctccccatggggacagaaggagctctgagtcctggagtgagcacatcagggatttccagcagccaaggagagcagagtaatccagctcagtctcctttctctcctcatacctcccctcacctgcctggcatccgaggcccttccccgtcccctgttggctctcccgccagtgttgctcagtctcgctcaggaccactctcgcctgctgcagtgccaggcaaccagatgccacctcggccacccagtggccagtcggacagcatcatgcatccttccatgaaccaatcaagcattgcccaagatcgaggttatatgcagaggaacccccagatgccccagtacagttccccccagcccggctcagccttatctccgcgtcagccttccggaggacagatacacacaggcatgggctcctaccagcagaactccatggggagctatggtccccaggggggtcagtatggcccacaaggtggctaccccaggcagccaaactataatgccttgcccaatgccaactaccccagtgcaggcatggctggaggcataaaccccatgggtgccggaggtcaaatgcatggacagcctggcatcccaccttatggcacactccctccagggaggatgagtcacgcctccatgggcaaccggccttatggccctaacatggccaatatgccacctcaggttgggtcagggatgtgtcccccaccagggggcatgaaccggaaaacccaagaaactgctgtcgccatgcatgttgctgccaactctatccaaaacaggccgccaggctaccccaatatgaatcaagggggcatgatgggaactggacctccttatggacaagggattaatagtatggctggcatgatcaaccctcagggacccccatattccatgggtggaaccatggccaacaattctgcagggatggcagccagcccagagatgatgggccttggggatgtaaagttaactccagccaccaaaatgaacaacaaggcagatgggacacccaagacagaatccaaatccaagaaatccagttcttctactacaaccaatgagaagatcaccaagttgtatgagctgggtggtgagcctgagaggaagatgtgggtggaccgttatctggccttcactgaggagaaggccatgggcatgacaaatctgcctgctgtgggtaggaaacctctggacctctatcgcctctatgtgtctgtgaaggagattggtggattgactcaggtcaacaagaacaaaaatggcgggaacttgcaaccaacctcaatgtgggcacatcaagcagtgctgccagctccttgaaaaagcagtatatccagtgtctctatgcctttgaatgcaagattgaacggggagaagaccctcccccagacatctttgcagctgctgattccaagaagtcccagcccaagatccagcctccctctcctgcgggatcaggatctatgcaggggccccagactccccagtcaaccagcagttccatggcagaaggaggagacttaaagccaccaactccagcatccacaccacacagtcagatccccccattgccaggcatgagcaggagcaattcagttgggatccaggatgcctttaatgatggaagtgactccacattccagaagcggaattccatgactccaaaccctgggtatcagcccagtatgaatacctctgacatgatggggcgcatgtcctatgagccaaataaggatccttatggcagcatgaggaaagctccagggagtgatcccttcatgtcctcagggcagggccccaacggcgggatgggtgacccctacagtcgtgctgccggccctgggctaggaaatgtggcgatgggaccacgacagcactatccctatggaggtccttatgacagagtgaggacggagcctggaatagggcctgagggaaacatgagcactggggccccacagccgaatctcatgccttccaacccagactcggggatgtattctcctagccgctaccccccgcagcagcagcagcagcagcagcaacgacatgattcctatggcaatcagttctccacccaaggcaccccttctggcagccccttccccagccagcagactacaatgtatcaacagcaacagcagaattacaagcggccaatggatggcacatatggccctcctgccaagcggcacgaaggggagatgtacagcgtgccatacagcactgggcaggggcagcctcagcagcagcagttgcccccagcccagccccagcctgccagccagcaacaagctgcccagccttcccctcagcaagatgtatacaaccagtatggcaatgcctatcctgccactgccacagctgctactgagcgccgaccagcaggcggcccccagaaccaatttccattccagtttggccgagaccgtgtctctgcaccccctggcaccaatgcccagcaaaacatgccaccacaaatgatgggcggccccatacaggcatcagctgaggttgctcagcaaggcaccatgtggcaggggcgtaatgacatgacctataattatgccaacaggcagagcacgggctctgccccccagggccccgcctatcatggcgtgaaccgaacagatgaaatgctgcacacagatcagagggccaaccacgaaggctcgtggccttcccatggcacacgccagcccccatatggtccctctgcccctgtgccccccatgacaaggccccctccatctaactaccagcccccaccaagcatgcagaatcacattcctcaggtatccagccctgctcccctgccccggccaatggagaaccgcacctctcctagcaagtctccattcctgcactctgggatgaaaatgcagaaggcaggtcccccagtacctgcctcgcacatagcacctgcccctgtgcagccccccatgattcggcgggatatcaccttcccacctggctctgttgaagccacacagcctgtgttgaagcagaggaggcggctcacaatgaaagacattggaaccccggaggcatggcgggtaatgatgtccctcaagtctggtctcctggcagagagcacatgggcattagataccatcaacatcctgctgtatgatgacaacagcatcatgaccttcaacctcagtcagctcccagggttgctagagctccttgtagaatatttccgacgatgcctgattgagatctttggcattttaaaggagtatgaggtgggtgacccaggacagagaacgctactggatcctgggaggttcagcaaggtgtctagtccagctcccatggagggtggggaagaagaagaagaacttctaggtcctaaactagaagaggaagaagaagaggaagtagttgaaaatgatgaggagatagccttttcaggcaaggacaagccagcttcagagaatagtgaggagaagctgatcagtaagtttgacaagcttccagtaaagatcgtacagaagaatgatccatttgtggtggactgctcagataagcttgggcgtgtgcaggagtttgacagtggcctgctgcactggcggattggtgggggggacaccactgagcatatccagacccacttcgagagcaagacagagctgctgccttcccggcctcacgcaccctgcccaccagcccctcggaagcatgtgacaacagcagagggtacaccagggacaacagaccaggaggggcccccacctgatggacctccagaaaaacggatcacagccactatggatgacatgttgtctactcggtctagcaccttgaccgaggatggagctaagagttcagaggccatcaaggagagcagcaagtttccatttggcattagcccagcacagagccaccggaacatcaagatcctagaggacgaaccccacagtaaggatgagaccccactgtgtacccttctggactggcaggattctcttgccaagcgctgcgtctgtgtgtccaataccattcgaagcctgtcatttgtgccaggcaatgactttgagatgtccaaacacccagggctgctgctcatcctgggcaagctgatcctgctgcaccacaagcacccagaacggaagcaggcaccactaacttatgaaaaggaggaggaacaggaccaaggggtgagctgcaacaaagtggagtggtggtgggactgcttggagatgctccgggaaaacaccttggttacactcgccaacatctcggggcagttggacctatctccataccccgagagcatttgcctgcctgtcctggacggactcctacactgggcagtttgcccttcagctgaagcccaggaccccttttccaccctgggccccaatgccgtcctttccccgcagagactggtcttggaaaccctcagcaaactcagcatccaggacaacaatgtggacctgattctggccacaccccccttcagccgcctggagaagttgtatagcactatggtgcgcttcctcagtgaccgaaagaacccggtgtgccgggagatggctgtggtactgctggccaacctggctcagggggacagcctggcagctcgtgccattgcagtgcagaagggcagtatcggcaacctcctgggcttcctagaggacagccttgccgccacacagttccagcagagccaggccagcctcctccacatgcagaacccaccctttgagccaactagtgtggacatgatgcggcgggctgcccgcgcgctgcttgccttggccaaggtggacgagaaccactcagagtttactctgtacgaatcacggctgttggacatctcggtatcaccgttgatgaactcattggtttcacaagtcatttgtgatgtactgtttttgattggccagtcatgacagccgtgggacacctcccccccccgtgtgtgtgtgcgtgtgtggagaacttagaaactgactgttgccctttatttatgcaaaaccacctcagaatccagtttaccctgtgctgtccagcttctcccttgggaaaaagtctctcctgtttctctctcctccttccacctcccctccctccatcacctcacgcctttctgttccttgtcctcaccttactcccctcaggaccctaccccaccctctttgaaaagacaaagctctgcctacatagaagactttttttattttaaccaaagttactgttgtttacagtgagtttggggaaaaaaaataaaataaaaatggctttcccagtccttgcatcaacgggatgccacatttcataactgtttttaatggtaaaaaaaaaaaaaaaaaatacaaaaaaaaattctgaaggacaaaaaaggtgactgctgaactgtgtgtggtttattgttgtacattcacaatcttgcaggagccaagaagttcgcagttgtgaacagaccctgttcactggagaggcctgtgcagtagagtgtagaccctttcatgtactgtactgtacacctgatactgtaaacatactgtaataataatgtctcacatggaaacagaaaacgctgggtcagcagcaagctgtagtttttaaaaatgtttttagttaaacgttgaggagaaaaaaaaaaaaggcttttcccccaaagtatcatgtgtgaacctacaacaccctgacctctttctctcctccttgattgtatgaataaccctgagatcacctcttagaactggttttaacctttagctgcagcggctacgctgccacgtgtgtatatatatgacgttgtacattgcacatacccttggatccccacagtttggtcctcctcccagctacccctttatagtatgacgagttaacaagttggtgacctgcacaaagcgagacacagctatttaatctcttgccagatatcgcccctcttggtgcgatgctgtacaggtctctgtaaaaagtccttgctgtctcagcagccaatcaacttatagtttatttttttctgggtttttgttttgttttgttttctttctaatcgaggtgtgaaaaagttctaggttcagttgaagttctgatgaagaaacacaattgagattttttcagtgataaaatctgcatatttgtatttcaacaatgtagctaaaacttgatgtaaattcctcctttttttccttttttggcttaatgaatatcatttattcagtatgaaatctttatactatatgttccacgtgttaagaataaatgtacattaaatcttggtaagacttt

SEQ ID NO: 101 - DNA, 8585 bp, Homo sapiens
cagaaagcggagagtcacagcggggccaggccctggggagcggagcctccaccgcccccctcattcccaggcaagggcttggggggaatgagccgggagagccgggtcccgagcctacagagccgggagcagctgagccgccggcgcctcggccgccgccgccgcctcctcctcctccgccgccgccagcccggagcctgagccggcggggcgggggggagaggagcgagcgcagcgcagcagcggagccccgcgaggcccgcccgggcgggtggggagggcagcccgggggactgggccccggggcggggtgggagggggggagaagacgaagacagggccgggtctctccgcggacgagacagcggggatcatggccgcgcaggtcgcccccgccgccgccagcagcctgggcaacccgccgccgccgccgccctcggagctgaagaaagccgagcagcagcagcgggaggaggcggggggcgaggcggcggcggcggcagcggccgagcgcggggaaatgaaggcagccgccgggcaggaaagcgagggccccgccgtggggccgccgcagccgctgggaaaggagctgcaggacggggccgagagcaatgggggtggcggcggcggcggagccggcagcggcggcgggcccggcgcggagccggacctgaagaactcgaacgggaacgcgggccctaggcccgccctgaacaataacctcacggagccgcccggcggcggcggtggcggcagcagcgatggggtgggggcgcctcctcactcagccgcggccgccttgccgcccccagcctacggcttcgggcaaccctacggccggagcccgtctgccgtcgccgccgccgcggccgccgtcttccaccaacaacatggcggacaacaaagccctggcctggcagcgctgcagagcggcggcggcgggggcctggagccctacgcggggccccagcagaactctcacgaccacggcttccccaaccaccagtacaactcctactaccccaaccgcagcgcctaccccccgcccgccccggcctacgcgctgagctccccgagaggtggcactccgggctccggcgcggcggcggctgccggctccaagccgcctccctcctccagcgcctccgcctcctcgtcgtcttcgtccttcgctcagcagcgcttcggggccatggggggaggcggcccctccgcggccggcgggggaactccccagcccaccgccacccccaccctcaaccaactgctcacgtcgcccagctcggcccggggctaccagggctaccccgggggcgactacagtggcgggccccaggacgggggcgccggcaagggcccggcggacatggcctcgcagtgttggggggctgcggcggcggcagctgcggcggcggccgcctcgggaggggcccaacaaaggagccaccacgcgcccatgagccccgggagcagcggcggcggggggcagccgctcgcccggacccctcagccatccagtccaatggatcagatgggcaagatgagacctcagccatatggcgggactaacccatactcgcagcaacagggacctccgtcaggaccgcagcaaggacatgggtacccagggcagccatacgggtcccagaccccgcagcggtacccgatgaccatgcagggccgggcgcagagtgccatgggcggcctctcttatacacagcagattcctccttatggacaacaaggccccagcgggtatggtcaacagggccagactccatattacaaccagcaaagtcctcaccctcagcagcagcagccaccctactcccagcaaccaccgtcccagacccctcatgcccaaccttcgtatcagcagcagccacagtctcaaccaccacagctccagtcctctcagcctccatactcccagcagccatcccagcctccacatcagcagtccccggctccatacccctcccagcagtcgacgacacagcagcacccccagagccagcccccctactcacagccacaggctcagtctccttaccagcagcagcaacctcagcagccagcaccctcgacgctctcccagcaggctgcgtatcctcagccccagtctcagcagtcccagcaaactgcctattcccagcagcgcttccctccaccgcaggagctatctcaagattcatttgggtctcaggcatcctcagccccctcaatgacctccagtaagggagggcaagaagatatgaacctgagccttcagtcaagaccctccagcttgcctgatctatctggttcaatagatgacctccccatggggacagaaggagctctgagtcctggagtgagcacatcagggatttccagcagccaaggagagcagagtaatccagctcagtctcctttctctcctcatacctcccctcacctgcctggcatccgaggcccttccccgtcccctgttggctctcccgccagtgttgctcagtctcgctcaggaccactctcgcctgctgcagtgccaggcaaccagatgccacctcggccacccagtggccagtcggacagcatcatgcatccttccatgaaccaatcaagcattgcccaagatcgaggttatatgcagaggaacccccagatgccccagtacagttccccccagcccggctcagccttatctccgcgtcagccttccggaggacagatacacacaggcatgggctcctaccagcagaactccatggggagctatggtccccaggggggtcagtatggcccacaaggtggctaccccaggcagccaaactataatgccttgcccaatgccaactaccccagtgcaggcatggctggaggcataaaccccatgggtgccggaggtcaaatgcatggacagcctggcatcccaccttatggcacactccctccagggaggatgagtcacgcctccatgggcaaccggccttatggccctaacatggccaatatgccacctcaggttgggtcagggatgtgtcccccaccagggggcatgaaccggaaaacccaataaactgctgtcgccatgcatgttgctgccaactctatccaaaacaggccgccaggctaccccaatatgaatcaagggggcatgatgggaactggacctccttatggacaagggattaatagtatggctggcatgatcaaccctcagggacccccatattccatgggtggaaccatggccaacaattctgcagggatggcagccagcccagagatgatgggccttggggatgtaaagttaactccagccaccaaaatgaacaacaaggcagatgggacacccaagacagaatccaaatccaagaaatccagttcttctactacaaccaatgagaagatcaccaagttgtatgagctgggtggtgagcctgagaggaagatgtgggtggaccgttatctggccttcactgaggagaaggccatgggcatgacaaatctgcctgctgtgggtaggaaacctctggacctctatcgcctctatgtgtctgtgaaggagattggtggattgactcaggtcaacaagaacaaaaaatggcgggaacttgcaaccaacctcaatgtgggcacatcaagcagtgctgccagctccttgaaaaagcagtatatccagtgtctctatgcctttgaatgcaagattgaacggggagaagaccctcccccagacatctttgcagctgctgattccaagaagtcccagcccaagatccagcctccctctcctgcgggatcaggatctatgcaggggccccagactccccagtcaaccagcagttccatggcagaaggaggagacttaaagccaccaactccagcatccacaccacacagtcagatccccccattgccaggcatgagcaggagcaattcagttgggatccaggatgcctttaatgatggaagtgactccacattccagaagcggaattccatgactccaaaccctgggtatcagcccagtatgaatacctctgacatgatggggcgcatgtcctatgagccaaataaggatccttatggcagcatgaggaaagctccagggagtgatcccttcatgtcctcagggcagggccccaacggcgggatgggtgacccctacagtcgtgctgccggccctgggctaggaaatgtggcgatgggaccacgacagcactatccctatggaggtccttatgacagagtgaggacggagcctggaatagggcctgagggaaacatgagcactggggccccacagccgaatctcatgccttccaacccagactcggggatgtattctcctagccgctaccccccgcagcagcagcagcagcagcagcaacgacatgattcctatggcaatcagttctccacccaaggcaccccttctggcagccccttccccagccagcagactacaatgtatcaacagcaacagcagaattacaagcggccaatggatggcacatatggccctcctgccaagcggcacgaaggggagatgtacagcgtgccatacagcactgggcaggggcagcctcagcagcagcagttgcccccagcccagccccagcctgccagccagcaacaagctgcccagccttcccctcagcaagatgtatacaaccagtatggcaatgcctatcctgccactgccacagctgctactgagcgccgaccagcaggcggcccccagaaccaatttccattccagtttggccgagaccgtgtctctgcaccccctggcaccaatgcccagcaaaacatgccaccacaaatgatgggcggccccatacaggcatcagctgaggttgctcagcaaggcaccatgtggcaggggcgtaatgacatgacctataattatgccaacaggcagagcacgggctctgccccccagggccccgcctatcatggcgtgaaccgaacagatgaaatgctgcacacagatcagagggccaaccacgaaggctcgtggccttcccatggcacacgccagcccccatatggtccctctgcccctgtgccccccatgacaaggccccctccatctaactaccagcccccaccaagcatgcagaatcacattcctcaggtatccagccctgctcccctgccccggccaatggagaaccgcacctctcctagcaagtctccattcctgcactctgggatgaaaatgcagaaggcaggtcccccagtacctgcctcgcacatagcacctgcccctgtgcagccccccatgattcggcgggatatcaccttcccacctggctctgttgaagccacacagcctgtgttgaagcagaggaggcggctcacaatgaaagacattggaaccccggaggcatggcgggtaatgatgtccctcaagtctggtctcctggcagagagcacatgggcattagataccatcaacatcctgctgtatgatgacaacagcatcatgaccttcaacctcagtcagctcccagggttgctagagctccttgtagaatatttccgacgatgcctgattgagatctttggcattttaaaggagtatgaggtgggtgacccaggacagagaacgctactggatcctgggaggttcagcaaggtgtctagtccagctcccatggagggtggggaagaagaagaagaacttctaggtcctaaactagaagaggaagaagaagaggaagtagttgaaaatgatgaggagatagccttttcaggcaaggacaagccagcttcagagaatagtgaggagaagctgatcagtaagtttgacaagcttccagtaaagatcgtacagaagaatgatccatttgtggtggactgctcagataagcttgggcgtgtgcaggagtttgacagtggcctgctgcactggcggattggtgggggggacaccactgagcatatccagacccacttcgagagcaagacagagctgctgccttcccggcctcacgcaccctgcccaccagcccctcggaagcatgtgacaacagcagagggtacaccagggacaacagaccaggaggggcccccacctgatggacctccagaaaaacggatcacagccactatggatgacatgttgtctactcggtctagcaccttgaccgaggatggagctaagagttcagaggccatcaaggagagcagcaagtttccatttggcattagcccagcacagagccaccggaacatcaagatcctagaggacgaaccccacagtaaggatgagaccccactgtgtacccttctggactggcaggattctcttgccaagcgctgcgtctgtgtgtccaataccattcgaagcctgtcatttgtgccaggcaatgactttgagatgtccaaacacccagggctgctgctcatcctgggcaagctgatcctgctgcaccacaagcacccagaacggaagcaggcaccactaacttatgaaaaggaggaggaacaggaccaaggggtgagctgcaacaaagtggagtggtggtgggactgcttggagatgctccgggaaaacaccttggttacactcgccaacatctcggggcagttggacctatctccataccccgagagcatttgcctgcctgtcctggacggactcctacactgggcagtttgcccttcagctgaagcccaggaccccttttccaccctgggccccaatgccgtcctttccccgcagagactggtcttggaaaccctcagcaaactcagcatccaggacaacaatgtggacctgattctggccacaccccccttcagccgcctggagaagttgtatagcactatggtgcgcttcctcagtgaccgaaagaacccggtgtgccgggagatggctgtggtactgctggccaacctggctcagggggacagcctggcagctcgtgccattgcagtgcagaagggcagtatcggcaacctcctgggcttcctagaggacagccttgccgccacacagttccagcagagccaggccagcctcctccacatgcagaacccaccctttgagccaactagtgtggacatgatgcggcgggctgcccgcgcgctgcttgccttggccaaggtggacgagaaccactcagagtttactctgtacgaatcacggctgttggacatctcggtatcaccgttgatgaactcattggtttcacaagtcatttgtgatgtactgtttttgattggccagtcatgacagccgtgggacacctcccccccccgtgtgtgtgtgcgtgtgtggagaacttagaaactgactgttgccctttatttatgcaaaaccacctcagaatccagtttaccctgtgctgtccagcttctcccttgggaaaaagtctctcctgtttctctctcctccttccacctcccctccctccatcacctcacgcctttctgttccttgtcctcaccttactcccctcaggaccctaccccaccctctttgaaaagacaaagctctgcctacatagaagactttttttattttaaccaaagttactgttgtttacagtgagtttggggaaaaaaaataaaataaaaatggctttcccagtccttgcatcaacgggatgccacatttcataactgtttttaatggtaaaaaaaaaaaaaaaaaatacaaaaaaaaattctgaaggacaaaaaaggtgactgctgaactgtgtgtggtttattgttgtacattcacaatcttgcaggagccaagaagttcgcagttgtgaacagaccctgttcactggagaggcctgtgcagtagagtgtagaccctttcatgtactgtactgtacacctgatactgtaaacatactgtaataataatgtctcacatggaaacagaaaacgctgggtcagcagcaagctgtagtttttaaaaatgtttttagttaaacgttgaggagaaaaaaaaaaaaggcttttcccccaaagtatcatgtgtgaacctacaacaccctgacctctttctctcctccttgattgtatgaataaccctgagatcacctcttagaactggttttaacctttagctgcagcggctacgctgccacgtgtgtatatatatgacgttgtacattgcacatacccttggatccccacagtttggtcctcctcccagctacccctttatagtatgacgagttaacaagttggtgacctgcacaaagcgagacacagctatttaatctcttgccagatatcgcccctcttggtgcgatgctgtacaggtctctgtaaaaagtccttgctgtctcagcagccaatcaacttatagtttatttttttctgggtttttgttttgttttgttttctttctaatcgaggtgtgaaaaagttctaggttcagttgaagttctgatgaagaaacacaattgagattttttcagtgataaaatctgcatatttgtatttcaacaatgtagctaaaacttgatgtaaattcctcctttttttccttttttggcttaatgaatatcatttattcagtatgaaatctttatactatatgttccacgtgttaagaataaatgtacattaaatcttggtaagacttt

SEQ ID NO: 102 - DNA, 8584 bp, Homo sapiens
cagaaagcggagagtcacagcggggccaggccctggggagcggagcctccaccgcccccctcattcccaggcaagggcttggggggaatgagccgggagagccgggtcccgagcctacagagccgggagcagctgagccgccggcgcctcggccgccgccgccgcctcctcctcctccgccgccgccagcccggagcctgagccggcggggcgggggggagaggagcgagcgcagcgcagcagcggagccccgcgaggcccgcccgggcgggtggggagggcagcccgggggactgggccccggggcggggtgggagggggggagaagacgaagacagggccgggtctctccgcggacgagacagcggggatcatggccgcgcaggtcgcccccgccgccgccagcagcctgggcaacccgccgccgccgccgccctcggagctgaagaaagccgagcagcagcagcgggaggaggcggggggcgaggcggcggcggcggcagcggccgagcgcggggaaatgaaggcagccgccgggcaggaaagcgagggccccgccgtggggccgccgcagccgctgggaaaggagctgcaggacggggccgagagcaatgggggtggcggcggcggcggagccggcagcggcggcgggcccggcgcggagccggacctgaagaactcgaacgggaacgcgggccctaggcccgccctgaacaataacctcacggagccgcccggcggcggcggtggcggcagcagcgatggggtgggggcgcctcctcactcagccgcggccgccttgccgcccccagcctacggcttcgggcaaccctacggccggagcccgtctgccgtcgccgccgccgcggccgccgtcttccaccaacaacatggcggacaacaaagccctggcctggcagcgctgcagagcggcggcggcgggggcctggagccctacgcggggccccagcagaactctcacgaccacggcttccccaaccaccagtacaactcctactaccccaaccgcagcgcctaccccccgcccgccccggcctacgcgctgagctccccgagaggtggcactccgggctccggcgcggcggcggctgccggctccaagccgcctccctcctccagcgcctccgcctcctcgtcgtcttcgtccttcgctcagcagcgcttcggggccatggggggaggcggcccctccgcggccggcgggggaactccccagcccaccgccacccccaccctcaaccaactgctcacgtcgcccagctcggcccggggctaccagggctaccccgggggcgactacagtggcgggccccaggacgggggcgccggcaagggcccggcggacatggcctcgcagtgttggggggctgcggcggcggcagctgcggcggcggccgcctcgggaggggcccaacaaaggagccaccacgcgcccatgagccccgggagcagcggcggcggggggcagccgctcgcccggacccctcagccatccagtccaatggatcagatgggcaagatgagacctcagccatatggcgggactaacccatactcgcagcaacagggacctccgtcaggaccgcagcaaggacatgggtacccagggcagccatacgggtcccagaccccgcagcggtacccgatgaccatgcagggccgggcgcagagtgccatgggcggcctctcttatacacagcagattcctccttatggacaacaaggccccagcgggtatggtcaacagggccagactccatattacaaccagcaaagtcctcaccctcagcagcagcagccaccctactcccagcaaccaccgtcccagacccctcatgcccaaccttcgtatcagcagcagccacagtctcaaccaccacagctccagtcctctcagcctccatactcccagcagccatcccagcctccacatcagcagtccccggctccatacccctcccagcagtcgacgacacagcagcacccccagagccagcccccctactcacagccacaggctcagtctccttaccagcagcagcaacctcagcagccagcaccctcgacgctctcccagcaggctgcgtatcctcagccccagtctcagcagtcccagcaaactgcctattcccagcagcgcttccctccaccgcaggagctatctcaagattcatttgggtctcaggcatcctcagccccctcaatgacctccagtaagggagggcaagaagatatgaacctgagccttcagtcaagaccctccagcttgcctgatctatctggttcaatagatgacctccccatggggacagaaggagctctgagtcctggagtgagcacatcagggatttccagcagccaaggagagcagagtaatccagctcagtctcctttctctcctcatacctcccctcacctgcctggcatccgaggcccttccccgtcccctgttggctctcccgccagtgttgctcagtctcgctcaggaccactctcgcctgctgcagtgccaggcaaccagatgccacctcggccacccagtggccagtcggacagcatcatgcatccttccatgaaccaatcaagcattgcccaagatcgaggttatatgcagaggaacccccagatgccccagtacagttcccccagcccggctcagccttatctccgcgtcagccttccggaggacagatacacacaggcatgggctcctaccagcagaactccatggggagctatggtccccaggggggtcagtatggcccacaaggtggctaccccaggcagccaaactataatgccttgcccaatgccaactaccccagtgcaggcatggctggaggcataaaccccatgggtgccggaggtcaaatgcatggacagcctggcatcccaccttatggcacactccctccagggaggatgagtcacgcctccatgggcaaccggccttatggccctaacatggccaatatgccacctcaggttgggtcagggatgtgtcccccaccagggggcatgaaccggaaaacccaagaaactgctgtcgccatgcatgttgctgccaactctatccaaaacaggccgccaggctaccccaatatgaatcaagggggcatgatgggaactggacctccttatggacaagggattaatagtatggctggcatgatcaaccctcagggacccccatattccatgggtggaaccatggccaacaattctgcagggatggcagccagcccagagatgatgggccttggggatgtaaagttaactccagccaccaaaatgaacaacaaggcagatgggacacccaagacagaatccaaatccaagaaatccagttcttctactacaaccaatgagaagatcaccaagttgtatgagctgggtggtgagcctgagaggaagatgtgggtggaccgttatctggccttcactgaggagaaggccatgggcatgacaaatctgcctgctgtgggtaggaaacctctggacctctatcgcctctatgtgtctgtgaaggagattggtggattgactcaggtcaacaagaacaaaaaatggcgggaacttgcaaccaacctcaatgtgggcacatcaagcagtgctgccagctccttgaaaaagcagtatatccagtgtctctatgcctttgaatgcaagattgaacggggagaagaccctcccccagacatctttgcagctgctgattccaagaagtcccagcccaagatccagcctccctctcctgcgggatcaggatctatgcaggggccccagactccccagtcaaccagcagttccatggcagaaggaggagacttaaagccaccaactccagcatccacaccacacagtcagatccccccattgccaggcatgagcaggagcaattcagttgggatccaggatgcctttaatgatggaagtgactccacattccagaagcggaattccatgactccaaaccctgggtatcagcccagtatgaatacctctgacatgatggggcgcatgtcctatgagccaaataaggatccttatggcagcatgaggaaagctccagggagtgatcccttcatgtcctcagggcagggccccaacggcgggatgggtgacccctacagtcgtgctgccggccctgggctaggaaatgtggcgatgggaccacgacagcactatccctatggaggtccttatgacagagtgaggacggagcctggaatagggcctgagggaaacatgagcactggggccccacagccgaatctcatgccttccaacccagactcggggatgtattctcctagccgctaccccccgcagcagcagcagcagcagcagcaacgacatgattcctatggcaatcagttctccacccaaggcaccccttctggcagccccttccccagccagcagactacaatgtatcaacagcaacagcagaattacaagcggccaatggatggcacatatggccctcctgccaagcggcacgaaggggagatgtacagcgtgccatacagcactgggcaggggcagcctcagcagcagcagttgcccccagcccagccccagcctgccagccagcaacaagctgcccagccttcccctcagcaagatgtatacaaccagtatggcaatgcctatcctgccactgccacagctgctactgagcgccgaccagcaggcggcccccagaaccaatttccattccagtttggccgagaccgtgtctctgcaccccctggcaccaatgcccagcaaaacatgccaccacaaatgatgggcggccccatacaggcatcagctgaggttgctcagcaaggcaccatgtggcaggggcgtaatgacatgacctataattatgccaacaggcagagcacgggctctgccccccagggccccgcctatcatggcgtgaaccgaacagatgaaatgctgcacacagatcagagggccaaccacgaaggctcgtggccttcccatggcacacgccagcccccatatggtccctctgcccctgtgccccccatgacaaggccccctccatctaactaccagcccccaccaagcatgcagaatcacattcctcaggtatccagccctgctcccctgccccggccaatggagaaccgcacctctcctagcaagtctccattcctgcactctgggatgaaaatgcagaaggcaggtcccccagtacctgcctcgcacatagcacctgcccctgtgcagccccccatgattcggcgggatatcaccttcccacctggctctgttgaagccacacagcctgtgttgaagcagaggaggcggctcacaatgaaagacattggaaccccggaggcatggcgggtaatgatgtccctcaagtctggtctcctggcagagagcacatgggcattagataccatcaacatcctgctgtatgatgacaacagcatcatgaccttcaacctcagtcagctcccagggttgctagagctccttgtagaatatttccgacgatgcctgattgagatctttggcattttaaaggagtatgaggtgggtgacccaggacagagaacgctactggatcctgggaggttcagcaaggtgtctagtccagctcccatggagggtggggaagaagaagaagaacttctaggtcctaaactagaagaggaagaagaagaggaagtagttgaaaatgatgaggagatagccttttcaggcaaggacaagccagcttcagagaatagtgaggagaagctgatcagtaagtttgacaagcttccagtaaagatcgtacagaagaatgatccatttgtggtggactgctcagataagcttgggcgtgtgcaggagtttgacagtggcctgctgcactggcggattggtgggggggacaccactgagcatatccagacccacttcgagagcaagacagagctgctgccttcccggcctcacgcaccctgcccaccagcccctcggaagcatgtgacaacagcagagggtacaccagggacaacagaccaggaggggcccccacctgatggacctccagaaaaacggatcacagccactatggatgacatgttgtctactcggtctagcaccttgaccgaggatggagctaagagttcagaggccatcaaggagagcagcaagtttccatttggcattagcccagcacagagccaccggaacatcaagatcctagaggacgaaccccacagtaaggatgagaccccactgtgtacccttctggactggcaggattctcttgccaagcgctgcgtctgtgtgtccaataccattcgaagcctgtcatttgtgccaggcaatgactttgagatgtccaaacacccagggctgctgctcatcctgggcaagctgatcctgctgcaccacaagcacccagaacggaagcaggcaccactaacttatgaaaaggaggaggaacaggaccaaggggtgagctgcaacaaagtggagtggtggtgggactgcttggagatgctccgggaaaacaccttggttacactcgccaacatctcggggcagttggacctatctccataccccgagagcatttgcctgcctgtcctggacggactcctacactgggcagtttgcccttcagctgaagcccaggaccccttttccaccctgggccccaatgccgtcctttccccgcagagactggtcttggaaaccctcagcaaactcagcatccaggacaacaatgtggacctgattctggccacaccccccttcagccgcctggagaagttgtatagcactatggtgcgcttcctcagtgaccgaaagaacccggtgtgccgggagatggctgtggtactgctggccaacctggctcagggggacagcctggcagctcgtgccattgcagtgcagaagggcagtatcggcaacctcctgggcttcctagaggacagccttgccgccacacagttccagcagagccaggccagcctcctccacatgcagaacccaccctttgagccaactagtgtggacatgatgcggcgggctgcccgcgcgctgcttgccttggccaaggtggacgagaaccactcagagtttactctgtacgaatcacggctgttggacatctcggtatcaccgttgatgaactcattggtttcacaagtcatttgtgatgtactgtttttgattggccagtcatgacagccgtgggacacctcccccccccgtgtgtgtgtgcgtgtgtggagaacttagaaactgactgttgccctttatttatgcaaaaccacctcagaatccagtttaccctgtgctgtccagcttctcccttgggaaaaagtctctcctgtttctctctcctccttccacctcccctccctccatcacctcacgcctttctgttccttgtcctcaccttactcccctcaggaccctaccccaccctctttgaaaagacaaagctctgcctacatagaagactttttttattttaaccaaagttactgttgtttacagtgagtttggggaaaaaaaataaaataaaaatggctttcccagtccttgcatcaacgggatgccacatttcataactgtttttaatggtaaaaaaaaaaaaaaaaaatacaaaaaaaaattctgaaggacaaaaaaggtgactgctgaactgtgtgtggtttattgttgtacattcacaatcttgcaggagccaagaagttcgcagttgtgaacagaccctgttcactggagaggcctgtgcagtagagtgtagaccctttcatgtactgtactgtacacctgatactgtaaacatactgtaataataatgtctcacatggaaacagaaaacgctgggtcagcagcaagctgtagtttttaaaaatgtttttagttaaacgttgaggagaaaaaaaaaaaaggcttttcccccaaagtatcatgtgtgaacctacaacaccctgacctctttctctcctccttgattgtatgaataaccctgagatcacctcttagaactggttttaacctttagctgcagcggctacgctgccacgtgtgtatatatatgacgttgtacattgcacatacccttggatccccacagtttggtcctcctcccagctacccctttatagtatgacgagttaacaagttggtgacctgcacaaagcgagacacagctatttaatctcttgccagatatcgcccctcttggtgcgatgctgtacaggtctctgtaaaaagtccttgctgtctcagcagccaatcaacttatagtttatttttttctgggtttttgttttgttttgttttctttctaatcgaggtgtgaaaaagttctaggttcagttgaagttctgatgaagaaacacaattgagattttttcagtgataaaatctgcatatttgtatttcaacaatgtagctaaaacttgatgtaaattcctcctttttttccttttttggcttaatgaatatcatttattcagtatgaaatctttatactatatgttccacgtgttaagaataaatgtacattaaatcttggtaagacttt

SEQ ID NO: 103 - DNA, 8584 bp, Homo sapiens
cagaaagcggagagtcacagcggggccaggccctggggagcggagcctccaccgcccccctcattcccaggcaagggcttggggggaatgagccgggagagccgggtcccgagcctacagagccgggagcagctgagccgccggcgcctcggccgccgccgccgcctcctcctcctccgccgccgccagcccggagcctgagccggcggggcgggggggagaggagcgagcgcagcgcagcagcggagccccgcgaggcccgcccgggcgggtggggagggcagcccgggggactgggccccggggcggggtgggagggggggagaagacgaagacagggccgggtctctccgcggacgagacagcggggatcatggccgcgcaggtcgcccccgccgccgccagcagcctgggcaacccgccgccgccgccgccctcggagctgaagaaagccgagcagcagcagcgggaggaggcggggggcgaggcggcggcggcggcagcggccgagcgcggggaaatgaaggcagccgccgggcaggaaagcgagggccccgccgtggggccgccgcagccgctgggaaaggagctgcaggacggggccgagagcaatgggggtggcggcggcggcggagccggcagcggcggcgggcccggcgcggagccggacctgaagaactcgaacgggaacgcgggccctaggcccgccctgaacaataacctcacggagccgcccggcggcggcggtggcggcagcagcgatggggtgggggcgcctcctcactcagccgcggccgccttgccgcccccagcctacggcttcgggcaaccctacggccggagcccgtctgccgtcgccgccgccgcggccgccgtcttccaccaacaacatggcggacaacaaagccctggcctggcagcgctgcagagcggcggcggcgggggcctggagccctacgcggggccccagcagaactctcacgaccacggcttccccaaccaccagtacaactcctactaccccaaccgcagcgcctaccccccgcccgccccggcctacgcgctgagctccccgagaggtggcactccgggctccggcgcggcggcggctgccggctccaagccgcctccctcctccagcgcctccgcctcctcgtcgtcttcgtccttcgctcagcagcgcttcggggccatggggggaggcggcccctccgcggccggcgggggaactccccagcccaccgccacccccaccctcaaccaactgctcacgtcgcccagctcggcccggggctaccagggctaccccgggggcgactacagtggcgggccccaggacgggggcgccggcaagggcccggcggacatggcctcgcagtgttggggggctgcggcggcggcagctgcggcggcggccgcctcgggaggggcccaacaaaggagccaccacgcgcccatgagccccgggagcagcggcggcggggggcagccgctcgcccggacccctcagccatccagtccaatggatcagatgggcaagatgagacctcagccatatggcgggactaacccatactcgcagcaacagggacctccgtcaggaccgcagcaaggacatgggtacccagggcagccatacgggtcccagaccccgcagcggtacccgatgaccatgcagggccgggcgcagagtgccatgggcggcctctcttatacacagcagattcctccttatggacaacaaggccccagcgggtatggtcaacagggccagactccatattacaaccagcaaagtcctcaccctcagcagcagcagccaccctactcccagcaaccaccgtcccagacccctcatgcccaaccttcgtatcagcagcagccacagtctcaaccaccacagctccagtcctctcagcctccatactcccagcagccatcccagcctccacatcagcagtccccggctccatacccctcccagcagtcgacgacacagcagcacccccagagccagcccccctactcacagccacaggctcagtctccttaccagcagcagcaacctcagcagccagcaccctcgacgctctcccagcaggctgcgtatcctcagccccagtctcagcagtcccagcaaactgcctattcccagcagcgcttccctccaccgcaggagctatctcaagattcatttgggtctcaggcatcctcagccccctcaatgacctccagtaagggagggcaagaagatatgaacctgagccttcagtcaagaccctccagcttgcctgatctatctggttcaatagatgacctccccatggggacagaaggagctctgagtcctggagtgagcacatcagggatttccagcagccaaggagagcagagtaatccagctcagtctcctttctctcctcatacctcccctcacctgcctggcatccgaggcccttccccgtcccctgttggctctcccgccagtgttgctcagtctcgctcaggaccactctcgcctgctgcagtgccaggcaaccagatgccacctcggccacccagtggccagtcggacagcatcatgcatccttccatgaaccaatcaagcattgcccaagatcgaggttatatgcagaggaacccccagatgccccagtacagttccccccagcccggctcagccttatctccgcgtcagccttccggaggacagatacacacaggcatgggctcctaccagcagaactccatggggagctatggtccccaggggggtcagtatggcccacaaggtggctaccccaggcagccaaactataatgccttgcccaatgccaactaccccagtgcaggcatggctggaggcataaaccccatgggtgccggaggtcaaatgcatggacagcctggcatcccaccttatggcacactccctccagggaggatgagtcacgcctccatgggcaaccggccttatggccctaacatggccaatatgccacctcaggttgggtcagggatgtgtcccccaccagggggcatgaaccggaaaacccaagaaactgctgtcgccatgcatgttgctgccaactctatccaaaacaggccgccaggctaccccaatatgaatcaagggggcatgatgggaactggacctccttatggacaagggattaatagtatggctggcatgatcaaccctcagggacccccatattccatgggtggaaccatggccaacaattctgcagggatggcagccagcccagagatgatgggccttggggatgtaaagttaactccagccaccaaaatgaacaacaaggcagatgggacacccaagacagaatccaaatccaagaaatccagttcttctactacaaccaatgagaagatcaccaagttgtatgagctgggtggtgagcctgagaggaagatgtgggtggaccgttatctggccttcactgaggagaaggccatgggcatgacaaatctgcctgctgtgggtaggaaacctctggacctctatcgcctctatgtgtctgtgaaggagattggtggattgactcaggtcaacaagaacaaaaaatggcgggaacttgcaaccaacctcaatgtgggcacatcaagcagtgctgccagctccttgaaaaagcagtatatccagtgtctctatgcctttgaatgcaagattgaacggggagaagaccctcccccagacatctttgcagctgctgattccaagaagtcccagcccaagatccagcctccctctcctgcgggatcaggatctatgcaggggccccagactccccagtcaaccagcagttccatggcagaaggaggagacttaaagccaccaactccagcatccacaccacacagtcagatccccccattgccaggcatgagcaggagcaattcagttgggatccaggatgcctttaatgatggaagtgactccacattccagaagcggaattccatgactccaaaccctgggtatcagcccagtatgaatacctctgacatgatggggcgcatgtcctatgagccaaataaggatccttatggcagcatgaggaaagctccagggagtgatcccttcatgtcctcagggcagggccccaacggcgggatgggtgacccctacagtcgtgctgccggccctgggctaggaaatgtggcgatgggaccacgacagcactatccctatggaggtccttatgacagagtgaggacggagcctggaatagggcctgagggaaacatgagcactggggccccacagccgaatctcatgccttccaacccagactcggggatgtattctcctagccgctaccccccgcagcagcagcagcagcagcagcaacgacatgattcctatggcaatcagttctccacccaaggcaccccttctggcagccccttccccagccagcagactacaatgtatcaacagcaacagcagaattacaagcggccaatggatggcacatatggccctcctgccaagcggcacgaaggggagatgtacagcgtgccatacagcactgggcaggggcagcctcagcagcagcagttgcccccagcccagccccagcctgccagccagcaacaagctgcccagccttcccctcagcaagatgtatacaaccagtatggcaatgcctatcctgccactgccacagctgctactgagcgccgaccagcaggcggcccccagaaccaatttccattccagtttggccgagaccgtgtctctgcaccccctggcaccaatgcccagcaaaacatgccaccacaaatgatgggcggccccatacaggcatcagctgaggttgctcagcaaggcaccatgtggcaggggcgtaatgacatgacctataattatgccaacaggcagagcacgggctctgccccccagggccccgcctatcatggcgtgaaccgaacagatgaaatgctgcacacagatcagagggccaaccacgaaggctcgtggccttcccatggcacacgccagcccccatatggtccctctgcccctgtgccccccatgacaaggccccctccatctaactaccagcccccaccaagcatgcagaatcacattcctcaggtatccagccctgctcccctgccccggccaatggagaaccgcacctctcctagcaagtctccattcctgcactctgggatgaaaatgcagaaggcaggtcccccagtacctgcctcgcacatagcacctgcccctgtgcagccccccatgattcggcgggatatcaccttcccacctggctctgttgaagccacacagcctgtgttgaagcagaggaggcggctcacaatgaaagacattggaaccccggaggcatggcgggtaatgatgtccctcaagtctggtctcctggcagagagcacatgggcattagataccatcaacatcctgctgtatgatgacaacagcatcatgaccttcaacctcagtcagctcccagggttgctagagctccttgtagaatatttccgacgatgcctgattgagatctttggcattttaaaggagtatgaggtgggtgacccaggacagagaacgctactggatcctgggaggttcagcaaggtgtctagtccagctcccatggagggtggggaagaagaagaagaacttctaggtcctaaactagaagaggaagaagaagaggaagtagttgaaaatgatgaggagatagccttttcaggcaaggacaagccagcttcagagaatagtgaggagaagctgatcagtaagtttgacaagcttccagtaaagatcgtacagaagaatgatccatttgtggtggactgctcagataagcttgggcgtgtgcaggagtttgacagtggcctgctgcactggcggattggtgggggggacaccactgagcatatccagacccacttcgagagcaagacagagctgctgccttcccggcctcacgcaccctgcccaccagcccctcggaagcatgtgacaacagcagagggtacaccagggacaacagaccaggaggggcccccacctgatggacctccagaaaaacggatcacagccactatggatgacatgttgtctactcggtctagcaccttgaccgaggatggagctaagagttcagaggccatcaaggagagcagcaagtttccatttggcattagcccagcacagagccaccggaacatcaagatcctagaggacgaaccccacagtaaggatgagaccccactgtgtacccttctggactggcaggattctcttgccaagcgctgcgtctgtgtgtccaataccattcgaagcctgtcatttgtgccaggcaatgactttgagatgtccaaacacccagggctgctgctcatcctgggcaagctgatcctgctgcaccacaagcacccagaacggaagcaggcaccactaacttatgaaaaggaggaggaacaggaccaaggggtgagctgcaacaaagtggagtggtggtgggactgcttggagatgctccgggaaaacaccttggttacactcgccaacatctcggggcagttggacctatctccataccccgagagcatttgcctgcctgtcctggacggactcctacactgggcagtttgcccttcagctgaagcccaggaccccttttccaccctgggccccaatgccgtcctttccccgcagagactggtcttggaaaccctcagcaaactcagcatccaggacaacaatgtggacctgattctggccacacccccttcagccgcctggagaagttgtatagcactatggtgcgcttcctcagtgaccgaaagaacccggtgtgccgggagatggctgtggtactgctggccaacctggctcagggggacagcctggcagctcgtgccattgcagtgcagaagggcagtatcggcaacctcctgggcttcctagaggacagccttgccgccacacagttccagcagagccaggccagcctcctccacatgcagaacccaccctttgagccaactagtgtggacatgatgcggcgggctgcccgcgcgctgcttgccttggccaaggtggacgagaaccactcagagtttactctgtacgaatcacggctgttggacatctcggtatcaccgttgatgaactcattggtttcacaagtcatttgtgatgtactgtttttgattggccagtcatgacagccgtgggacacctcccccccccgtgtgtgtgtgcgtgtgtggagaacttagaaactgactgttgccctttatttatgcaaaaccacctcagaatccagtttaccctgtgctgtccagcttctcccttgggaaaaagtctctcctgtttctctctcctccttccacctcccctccctccatcacctcacgcctttctgttccttgtcctcaccttactcccctcaggaccctaccccaccctctttgaaaagacaaagctctgcctacatagaagactttttttattttaaccaaagttactgttgtttacagtgagtttggggaaaaaaaataaaataaaaatggctttcccagtccttgcatcaacgggatgccacatttcataactgtttttaatggtaaaaaaaaaaaaaaaaaatacaaaaaaaaattctgaaggacaaaaaaggtgactgctgaactgtgtgtggtttattgttgtacattcacaatcttgcaggagccaagaagttcgcagttgtgaacagaccctgttcactggagaggcctgtgcagtagagtgtagaccctttcatgtactgtactgtacacctgatactgtaaacatactgtaataataatgtctcacatggaaacagaaaacgctgggtcagcagcaagctgtagtttttaaaaatgtttttagttaaacgttgaggagaaaaaaaaaaaaggcttttcccccaaagtatcatgtgtgaacctacaacaccctgacctctttctctcctccttgattgtatgaataaccctgagatcacctcttagaactggttttaacctttagctgcagcggctacgctgccacgtgtgtatatatatgacgttgtacattgcacatacccttggatccccacagtttggtcctcctcccagctacccctttatagtatgacgagttaacaagttggtgacctgcacaaagcgagacacagctatttaatctcttgccagatatcgcccctcttggtgcgatgctgtacaggtctctgtaaaaagtccttgctgtctcagcagccaatcaacttatagtttatttttttctgggtttttgttttgttttgttttctttctaatcgaggtgtgaaaaagttctaggttcagttgaagttctgatgaagaaacacaattgagattttttcagtgataaaatctgcatatttgtatttcaacaatgtagctaaaacttgatgtaaattcctcctttttttccttttttggcttaatgaatatcatttattcagtatgaaatctttatactatatgttccacgtgttaagaataaatgtacattaaatcttggtaagacttt

SEQ ID NO: 104 - DNA, 8586 bp, Homo sapiens
cagaaagcggagagtcacagcggggccaggccctggggagcggagcctccaccgcccccctcattcccaggcaagggcttggggggaatgagccgggagagccgggtcccgagcctacagagccgggagcagctgagccgccggcgcctcggccgccgccgccgcctcctcctcctccgccgccgccagcccggagcctgagccggcggggcgggggggagaggagcgagcgcagcgcagcagcggagccccgcgaggcccgcccgggcgggtggggagggcagcccgggggactgggccccggggcggggtgggagggggggagaagacgaagacagggccgggtctctccgcggacgagacagcggggatcatggccgcgcaggtcgcccccgccgccgccagcagcctgggcaacccgccgccgccgccgccctcggagctgaagaaagccgagcagcagcagcgggaggaggcggggggcgaggcggcggcggcggcagcggccgagcgcggggaaatgaaggcagccgccgggcaggaaagcgagggccccgccgtggggccgccgcagccgctgggaaaggagctgcaggacggggccgagagcaatgggggtggcggcggcggcggagccggcagcggcggcgggcccggcgcggagccggacctgaagaactcgaacgggaacgcgggccctaggcccgccctgaacaataacctcacggagccgcccggcggcggcggtggcggcagcagcgatggggtgggggcgcctcctcactcagccgcggccgccttgccgcccccagcctacggcttcgggcaaccctacggccggagcccgtctgccgtcgccgccgccgcggccgccgtcttccaccaacaacatggcggacaacaaagccctggcctggcagcgctgcagagcggcggcggcgggggcctggagccctacgcggggccccagcagaactctcacgaccacggcttccccaaccaccagtacaactcctactaccccaaccgcagcgcctaccccccgcccgccccggcctacgcgctgagctccccgagaggtggcactccgggctccggcgcggcggcggctgccggctccaagccgcctccctcctccagcgcctccgcctcctcgtcgtcttcgtccttcgctcagcagcgcttcggggccatggggggaggcggcccctccgcggccggcgggggaactccccagcccaccgccacccccaccctcaaccaactgctcacgtcgcccagctcggcccggggctaccagggctaccccgggggcgactacagtggcgggccccaggacgggggcgccggcaagggcccggcggacatggcctcgcagtgttggggggctgcggcggcggcagctgcggcggcggccgcctcgggaggggcccaacaaaggagccaccacgcgcccatgagccccgggagcagcggcggcggggggcagccgctcgcccggacccctcagccatccagtccaatggatcagatgggcaagatgagacctcagccatatggcgggactaacccatactcgcagcaacagggacctccgtcaggaccgcagcaaggacatgggtacccagggcagccatacgggtcccagaccccgcagcggtacccgatgaccatgcagggccgggcgcagagtgccatgggcggcctctcttatacacagcagattcctccttatggacaacaaggccccagcgggtatggtcaacagggccagactccatattacaaccagcaaagtcctcaccctcagcagcagcagccaccctactcccagcaaccaccgtcccagacccctcatgcccaaccttcgtatcagcagcagccacagtctcaaccaccacagctccagtcctctcagcctccatactcccagcagccatcccagcctccacatcagcagtccccggctccatacccctcccagcagtcgacgacacagcagcacccccagagccagcccccctactcacagccacaggctcagtctccttaccagcagcagcaacctcagcagccagcaccctcgacgctctcccagcaggctgcgtatcctcagccccagtctcagcagtcccagcaaactgcctattcccagcagcgcttccctccaccgcaggagctatctcaagattcatttgggtctcaggcatcctcagccccctcaatgacctccagtaagggagggcaagaagatatgaacctgagccttcagtcaagaccctccagcttgcctgatctatctggttcaatagatgacctccccatggggacagaaggagctctgagtcctggagtgagcacatcagggatttccagcagccaaggagagcagagtaatccagctcagtctcctttctctcctcatacctcccctcacctgcctggcatccgaggcccttccccgtcccctgttggctctcccgccagtgttgctcagtctcgctcaggaccactctcgcctgctgcagtgccaggcaaccagatgccacctcggccacccagtggccagtcggacagcatcatgcatccttccatgaaccaatcaagcattgcccaagatcgaggttatatgcagaggaacccccagatgccccagtacagttccccccagcccggctcagccttatctccgcgtcagccttccggaggacagatacacacaggcatgggctcctaccagcagaactccatggggagctatggtccccaggggggtcagtatggcccacaaggtggcttaccccaggcagccaaactataatgccttgcccaatgccaactaccccagtgcaggcatggctggaggcataaaccccatgggtgccggaggtcaaatgcatggacagcctggcatcccaccttatggcacactccctccagggaggatgagtcacgcctccatgggcaaccggccttatggccctaacatggccaatatgccacctcaggttgggtcagggatgtgtcccccaccagggggcatgaaccggaaaacccaagaaactgctgtcgccatgcatgttgctgccaactctatccaaaacaggccgccaggctaccccaatatgaatcaagggggcatgatgggaactggacctccttatggacaagggattaatagtatggctggcatgatcaaccctcagggacccccatattccatgggtggaaccatggccaacaattctgcagggatggcagccagcccagagatgatgggccttggggatgtaaagttaactccagccaccaaaatgaacaacaaggcagatgggacacccaagacagaatccaaatccaagaaatccagttcttctactacaaccaatgagaagatcaccaagttgtatgagctgggtggtgagcctgagaggaagatgtgggtggaccgttatctggccttcactgaggagaaggccatgggcatgacaaatctgcctgctgtgggtaggaaacctctggacctctatcgcctctatgtgtctgtgaaggagattggtggattgactcaggtcaacaagaacaaaaaatggcgggaacttgcaaccaacctcaatgtgggcacatcaagcagtgctgccagctccttgaaaaagcagtatatccagtgtctctatgcctttgaatgcaagattgaacggggagaagaccctcccccagacatctttgcagctgctgattccaagaagtcccagcccaagatccagcctccctctcctgcgggatcaggatctatgcaggggccccagactccccagtcaaccagcagttccatggcagaaggaggagacttaaagccaccaactccagcatccacaccacacagtcagatccccccattgccaggcatgagcaggagcaattcagttgggatccaggatgcctttaatgatggaagtgactccacattccagaagcggaattccatgactccaaaccctgggtatcagcccagtatgaatacctctgacatgatggggcgcatgtcctatgagccaaataaggatccttatggcagcatgaggaaagctccagggagtgatcccttcatgtcctcagggcagggccccaacggcgggatgggtgacccctacagtcgtgctgccggccctgggctaggaaatgtggcgatgggaccacgacagcactatccctatggaggtccttatgacagagtgaggacggagcctggaatagggcctgagggaaacatgagcactggggccccacagccgaatctcatgccttccaacccagactcggggatgtattctcctagccgctaccccccgcagcagcagcagcagcagcagcaacgacatgattcctatggcaatcagttctccacccaaggcaccccttctggcagccccttccccagccagcagactacaatgtatcaacagcaacagcagaattacaagcggccaatggatggcacatatggccctcctgccaagcggcacgaaggggagatgtacagcgtgccatacagcactgggcaggggcagcctcagcagcagcagttgcccccagcccagccccagcctgccagccagcaacaagctgcccagccttcccctcagcaagatgtatacaaccagtatggcaatgcctatcctgccactgccacagctgctactgagcgccgaccagcaggcggcccccagaaccaatttccattccagtttggccgagaccgtgtctctgcaccccctggcaccaatgcccagcaaaacatgccaccacaaatgatgggcggccccatacaggcatcagctgaggttgctcagcaaggcaccatgtggcaggggcgtaatgacatgacctataattatgccaacaggcagagcacgggctctgccccccagggccccgcctatcatggcgtgaaccgaacagatgaaatgctgcacacagatcagagggccaaccacgaaggctcgtggccttcccatggcacacgccagcccccatatggtccctctgcccctgtgccccccatgacaaggccccctccatctaactaccagcccccaccaagcatgcagaatcacattcctcaggtatccagccctgctcccctgccccggccaatggagaaccgcacctctcctagcaagtctccattcctgcactctgggatgaaaatgcagaaggcaggtcccccagtacctgcctcgcacatagcacctgcccctgtgcagccccccatgattcggcgggatatcaccttcccacctggctctgttgaagccacacagcctgtgttgaagcagaggaggcggctcacaatgaaagacattggaaccccggaggcatggcgggtaatgatgtccctcaagtctggtctcctggcagagagcacatgggcattagataccatcaacatcctgctgtatgatgacaacagcatcatgaccttcaacctcagtcagctcccagggttgctagagctccttgtagaatatttccgacgatgcctgattgagatctttggcattttaaaggagtatgaggtgggtgacccaggacagagaacgctactggatcctgggaggttcagcaaggtgtctagtccagctcccatggagggtggggaagaagaagaagaacttctaggtcctaaactagaagaggaagaagaagaggaagtagttgaaaatgatgaggagatagccttttcaggcaaggacaagccagcttcagagaatagtgaggagaagctgatcagtaagtttgacaagcttccagtaaagatcgtacagaagaatgatccatttgtggtggactgctcagataagcttgggcgtgtgcaggagtttgacagtggcctgctgcactggcggattggtgggggggacaccactgagcatatccagacccacttcgagagcaagacagagctgctgccttcccggcctcacgcaccctgcccaccagcccctcggaagcatgtgacaacagcagagggtacaccagggacaacagaccaggaggggcccccacctgatggacctccagaaaaacggatcacagccactatggatgacatgttgtctactcggtctagcaccttgaccgaggatggagctaagagttcagaggccatcaaggagagcagcaagtttccatttggcattagcccagcacagagccaccggaacatcaagatcctagaggacgaaccccacagtaaggatgagaccccactgtgtacccttctggactggcaggattctcttgccaagcgctgcgtctgtgtgtccaataccattcgaagcctgtcatttgtgccaggcaatgactttgagatgtccaaacacccagggctgctgctcatcctgggcaagctgatcctgctgcaccacaagcacccagaacggaagcaggcaccactaacttatgaaaaggaggaggaacaggaccaaggggtgagctgcaacaaagtggagtggtggtgggactgcttggagatgctccgggaaaacaccttggttacactcgccaacatctcggggcagttggacctatctccataccccgagagcatttgcctgcctgtcctggacggactcctacactgggcagtttgcccttcagctgaagcccaggaccccttttccaccctgggccccaatgccgtcctttccccgcagagactggtcttggaaaccctcagcaaactcagcatccaggacaacaatgtggacctgattctggccacaccccccttcagccgcctggagaagttgtatagcactatggtgcgcttcctcagtgaccgaaagaacccggtgtgccgggagatggctgtggtactgctggccaacctggctcagggggacagcctggcagctcgtgccattgcagtgcagaagggcagtatcggcaacctcctgggcttcctagaggacagccttgccgccacacagttccagcagagccaggccagcctcctccacatgcagaacccaccctttgagccaactagtgtggacatgatgcggcgggctgcccgcgcgctgcttgccttggccaaggtggacgagaaccactcagagtttactctgtacgaatcacggctgttggacatctcggtatcaccgttgatgaactcattggtttcacaagtcatttgtgatgtactgtttttgattggccagtcatgacagccgtgggacacctcccccccccgtgtgtgtgtgcgtgtgtggagaacttagaaactgactgttgccctttatttatgcaaaaccacctcagaatccagtttaccctgtgctgtccagcttctcccttgggaaaaagtctctcctgtttctctctcctccttccacctcccctccctccatcacctcacgcctttctgttccttgtcctcaccttactcccctcaggaccctaccccaccctctttgaaaagacaaagctctgcctacatagaagactttttttattttaaccaaagttactgttgtttacagtgagtttggggaaaaaaaataaaataaaaatggctttcccagtccttgcatcaacgggatgccacatttcataactgtttttaatggtaaaaaaaaaaaaaaaaaatacaaaaaaaaattctgaaggacaaaaaaggtgactgctgaactgtgtgtggtttattgttgtacattcacaatcttgcaggagccaagaagttcgcagttgtgaacagaccctgttcactggagaggcctgtgcagtagagtgtagaccctttcatgtactgtactgtacacctgatactgtaaacatactgtaataataatgtctcacatggaaacagaaaacgctgggtcagcagcaagctgtagtttttaaaaatgtttttagttaaacgttgaggagaaaaaaaaaaaaggcttttcccccaaagtatcatgtgtgaacctacaacaccctgacctctttctctcctccttgattgtatgaataaccctgagatcacctcttagaactggttttaacctttagctgcagcggctacgctgccacgtgtgtatatatatgacgttgtacattgcacatacccttggatccccacagtttggtcctcctcccagctacccctttatagtatgacgagttaacaagttggtgacctgcacaaagcgagacacagctatttaatctcttgccagatatcgcccctcttggtgcgatgctgtacaggtctctgtaaaaagtccttgctgtctcagcagccaatcaacttatagtttatttttttctgggtttttgttttgttttgttttctttctaatcgaggtgtgaaaaagttctaggttcagttgaagttctgatgaagaaacacaattgagattttttcagtgataaaatctgcatatttgtatttcaacaatgtagctaaaacttgatgtaaattcctcctttttttccttttttggcttaatgaatatcatttattcagtatgaaatctttatactatatgttccacgtgttaagaataaatgtacattaaatcttggtaagacttt

SEQ ID NO: 105 - DNA, 8585 bp, Homo sapiens
cagaaagcggagagtcacagcggggccaggccctggggagcggagcctccaccgcccccctcattcccaggcaagggcttggggggaatgagccgggagagccgggtcccgagcctacagagccgggagcagctgagccgccggcgcctcggccgccgccgccgcctcctcctcctccgccgccgccagcccggagcctgagccggcggggcgggggggagaggagcgagcgcagcgcagcagcggagccccgcgaggcccgcccgggcgggtggggagggcagcccgggggactgggccccggggcggggtgggagggggggagaagacgaagacagggccgggtctctccgcggacgagacagcggggatcatggccgcgcaggtcgcccccgccgccgccagcagcctgggcaacccgccgccgccgccgccctcggagctgaagaaagccgagcagcagcagcgggaggaggcggggggcgaggcggcggcggcggcagcggccgagcgcggggaaatgaaggcagccgccgggcaggaaagcgagggccccgccgtggggccgccgcagccgctgggaaaggagctgcaggacggggccgagagcaatgggggtggcggcggcggcggagccggcagcggcggcgggcccggcgcggagccggacctgaagaactcgaacgggaacgcgggccctaggcccgccctgaacaataacctcacggagccgcccggcggcggcggtggcggcagcagcgatggggtgggggcgcctcctcactcagccgcggccgccttgccgcccccagcctacggcttcgggcaaccctacggccggagcccgtctgccgtcgccgccgccgcggccgccgtcttccaccaacaacatggcggacaacaaagccctggcctggcagcgctgcagagcggcggcggcgggggcctggagccctacgcggggccccagcagaactctcacgaccacggcttccccaaccaccagtacaactcctactaccccaaccgcagcgcctaccccccgcccgccccggcctacgcgctgagctccccgagaggtggcactccgggctccggcgcggcggcggctgccggctccaagccgcctccctcctccagcgcctccgcctcctcgtcgtcttcgtccttcgctcagtagcgcttcggggccatggggggaggcggcccctccgcggccggcgggggaactccccagcccaccgccacccccaccctcaaccaactgctcacgtcgcccagctcggcccggggctaccagggctaccccgggggcgactacagtggcgggccccaggacgggggcgccggcaagggcccggcggacatggcctcgcagtgttggggggctgcggcggcggcagctgcggcggcggccgcctcgggaggggcccaacaaaggagccaccacgcgcccatgagccccgggagcagcggcggcggggggcagccgctcgcccggacccctcagccatccagtccaatggatcagatgggcaagatgagacctcagccatatggcgggactaacccatactcgcagcaacagggacctccgtcaggaccgcagcaaggacatgggtacccagggcagccatacgggtcccagaccccgcagcggtacccgatgaccatgcagggccgggcgcagagtgccatgggcggcctctcttatacacagcagattcctccttatggacaacaaggccccagcgggtatggtcaacagggccagactccatattacaaccagcaaagtcctcaccctcagcagcagcagccaccctactcccagcaaccaccgtcccagacccctcatgcccaaccttcgtatcagcagcagccacagtctcaaccaccacagctccagtcctctcagcctccatactcccagcagccatcccagcctccacatcagcagtccccggctccatacccctcccagcagtcgacgacacagcagcacccccagagccagcccccctactcacagccacaggctcagtctccttaccagcagcagcaacctcagcagccagcaccctcgacgctctcccagcaggctgcgtatcctcagccccagtctcagcagtcccagcaaactgcctattcccagcagcgcttccctccaccgcaggagctatctcaagattcatttgggtctcaggcatcctcagccccctcaatgacctccagtaagggagggcaagaagatatgaacctgagccttcagtcaagaccctccagcttgcctgatctatctggttcaatagatgacctccccatggggacagaaggagctctgagtcctggagtgagcacatcagggatttccagcagccaaggagagcagagtaatccagctcagtctcctttctctcctcatacctcccctcacctgcctggcatccgaggcccttccccgtcccctgttggctctcccgccagtgttgctcagtctcgctcaggaccactctcgcctgctgcagtgccaggcaaccagatgccacctcggccacccagtggccagtcggacagcatcatgcatccttccatgaaccaatcaagcattgcccaagatcgaggttatatgcagaggaacccccagatgccccagtacagttccccccagcccggctcagccttatctccgcgtcagccttccggaggacagatacacacaggcatgggctcctaccagcagaactccatggggagctatggtccccaggggggtcagtatggcccacaaggtggctaccccaggcagccaaactataatgccttgcccaatgccaactaccccagtgcaggcatggctggaggcataaaccccatgggtgccggaggtcaaatgcatggacagcctggcatcccaccttatggcacactccctccagggaggatgagtcacgcctccatgggcaaccggccttatggccctaacatggccaatatgccacctcaggttgggtcagggatgtgtcccccaccagggggcatgaaccggaaaacccaagaaactgctgtcgccatgcatgttgctgccaactctatccaaaacaggccgccaggctaccccaatatgaatcaagggggcatgatgggaactggacctccttatggacaagggattaatagtatggctggcatgatcaaccctcagggacccccatattccatgggtggaaccatggccaacaattctgcagggatggcagccagcccagagatgatgggccttggggatgtaaagttaactccagccaccaaaatgaacaacaaggcagatgggacacccaagacagaatccaaatccaagaaatccagttcttctactacaaccaatgagaagatcaccaagttgtatgagctgggtggtgagcctgagaggaagatgtgggtggaccgttatctggccttcactgaggagaaggccatgggcatgacaaatctgcctgctgtgggtaggaaacctctggacctctatcgcctctatgtgtctgtgaaggagattggtggattgactcaggtcaacaagaacaaaaaatggcgggaacttgcaaccaacctcaatgtgggcacatcaagcagtgctgccagctccttgaaaaagcagtatatccagtgtctctatgcctttgaatgcaagattgaacggggagaagaccctcccccagacatctttgcagctgctgattccaagaagtcccagcccaagatccagcctccctctcctgcgggatcaggatctatgcaggggccccagactccccagtcaaccagcagttccatggcagaaggaggagacttaaagccaccaactccagcatccacaccacacagtcagatccccccattgccaggcatgagcaggagcaattcagttgggatccaggatgcctttaatgatggaagtgactccacattccagaagcggaattccatgactccaaaccctgggtatcagcccagtatgaatacctctgacatgatggggcgcatgtcctatgagccaaataaggatccttatggcagcatgaggaaagctccagggagtgatcccttcatgtcctcagggcagggccccaacggcgggatgggtgacccctacagtcgtgctgccggccctgggctaggaaatgtggcgatgggaccacgacagcactatccctatggaggtccttatgacagagtgaggacggagcctggaatagggcctgagggaaacatgagcactggggccccacagccgaatctcatgccttccaacccagactcggggatgtattctcctagccgctaccccccgcagcagcagcagcagcagcagcaacgacatgattcctatggcaatcagttctccacccaaggcaccccttctggcagccccttccccagccagcagactacaatgtatcaacagcaacagcagaattacaagcggccaatggatggcacatatggccctcctgccaagcggcacgaaggggagatgtacagcgtgccatacagcactgggcaggggcagcctcagcagcagcagttgcccccagcccagccccagcctgccagccagcaacaagctgcccagccttcccctcagcaagatgtatacaaccagtatggcaatgcctatcctgccactgccacagctgctactgagcgccgaccagcaggcggcccccagaaccaatttccattccagtttggccgagaccgtgtctctgcaccccctggcaccaatgcccagcaaaacatgccaccacaaatgatgggcggccccatacaggcatcagctgaggttgctcagcaaggcaccatgtggcaggggcgtaatgacatgacctataattatgccaacaggcagagcacgggctctgccccccagggccccgcctatcatggcgtgaaccgaacagatgaaatgctgcacacagatcagagggccaaccacgaaggctcgtggccttcccatggcacacgccagcccccatatggtccctctgcccctgtgccccccatgacaaggccccctccatctaactaccagcccccaccaagcatgcagaatcacattcctcaggtatccagccctgctcccctgccccggccaatggagaaccgcacctctcctagcaagtctccattcctgcactctgggatgaaaatgcagaaggcaggtcccccagtacctgcctcgcacatagcacctgcccctgtgcagccccccatgattcggcgggatatcaccttcccacctggctctgttgaagccacacagcctgtgttgaagcagaggaggcggctcacaatgaaagacattggaaccccggaggcatggcgggtaatgatgtccctcaagtctggtctcctggcagagagcacatgggcattagataccatcaacatcctgctgtatgatgacaacagcatcatgaccttcaacctcagtcagctcccagggttgctagagctccttgtagaatatttccgacgatgcctgattgagatctttggcattttaaaggagtatgaggtgggtgacccaggacagagaacgctactggatcctgggaggttcagcaaggtgtctagtccagctcccatggagggtggggaagaagaagaagaacttctaggtcctaaactagaagaggaagaagaagaggaagtagttgaaaatgatgaggagatagccttttcaggcaaggacaagccagcttcagagaatagtgaggagaagctgatcagtaagtttgacaagcttccagtaaagatcgtacagaagaatgatccatttgtggtggactgctcagataagcttgggcgtgtgcaggagtttgacagtggcctgctgcactggcggattggtgggggggacaccactgagcatatccagacccacttcgagagcaagacagagctgctgccttcccggcctcacgcaccctgcccaccagcccctcggaagcatgtgacaacagcagagggtacaccagggacaacagaccaggaggggcccccacctgatggacctccagaaaaacggatcacagccactatggatgacatgttgtctactcggtctagcaccttgaccgaggatggagctaagagttcagaggccatcaaggagagcagcaagtttccatttggcattagcccagcacagagccaccggaacatcaagatcctagaggacgaaccccacagtaaggatgagaccccactgtgtacccttctggactggcaggattctcttgccaagcgctgcgtctgtgtgtccaataccattcgaagcctgtcatttgtgccaggcaatgactttgagatgtccaaacacccagggctgctgctcatcctgggcaagctgatcctgctgcaccacaagcacccagaacggaagcaggcaccactaacttatgaaaaggaggaggaacaggaccaaggggtgagctgcaacaaagtggagtggtggtgggactgcttggagatgctccgggaaaacaccttggttacactcgccaacatctcggggcagttggacctatctccataccccgagagcatttgcctgcctgtcctggacggactcctacactgggcagtttgcccttcagctgaagcccaggaccccttttccaccctgggccccaatgccgtcctttccccgcagagactggtcttggaaaccctcagcaaactcagcatccaggacaacaatgtggacctgattctggccacaccccccttcagccgcctggagaagttgtatagcactatggtgcgcttcctcagtgaccgaaagaacccggtgtgccgggagatggctgtggtactgctggccaacctggctcagggggacagcctggcagctcgtgccattgcagtgcagaagggcagtatcggcaacctcctgggcttcctagaggacagccttgccgccacacagttccagcagagccaggccagcctcctccacatgcagaacccaccctttgagccaactagtgtggacatgatgcggcgggctgcccgcgcgctgcttgccttggccaaggtggacgagaaccactcagagtttactctgtacgaatcacggctgttggacatctcggtatcaccgttgatgaactcattggtttcacaagtcatttgtgatgtactgtttttgattggccagtcatgacagccgtgggacacctcccccccccgtgtgtgtgtgcgtgtgtggagaacttagaaactgactgttgccctttatttatgcaaaaccacctcagaatccagtttaccctgtgctgtccagcttctcccttgggaaaaagtctctcctgtttctctctcctccttccacctcccctccctccatcacctcacgcctttctgttccttgtcctcaccttactcccctcaggaccctaccccaccctctttgaaaagacaaagctctgcctacatagaagactttttttattttaaccaaagttactgttgtttacagtgagtttggggaaaaaaaataaaataaaaatggctttcccagtccttgcatcaacgggatgccacatttcataactgtttttaatggtaaaaaaaaaaaaaaaaaatacaaaaaaaaattctgaaggacaaaaaaggtgactgctgaactgtgtgtggtttattgttgtacattcacaatcttgcaggagccaagaagttcgcagttgtgaacagaccctgttcactggagaggcctgtgcagtagagtgtagaccctttcatgtactgtactgtacacctgatactgtaaacatactgtaataataatgtctcacatggaaacagaaaacgctgggtcagcagcaagctgtagtttttaaaaatgtttttagttaaacgttgaggagaaaaaaaaaaaaggcttttcccccaaagtatcatgtgtgaacctacaacaccctgacctctttctctcctccttgattgtatgaataaccctgagatcacctcttagaactggttttaacctttagctgcagcggctacgctgccacgtgtgtatatatatgacgttgtacattgcacatacccttggatccccacagtttggtcctcctcccagctacccctttatagtatgacgagttaacaagttggtgacctgcacaaagcgagacacagctatttaatctcttgccagatatcgcccctcttggtgcgatgctgtacaggtctctgtaaaaagtccttgctgtctcagcagccaatcaacttatagtttatttttttctgggtttttgttttgttttgttttctttctaatcgaggtgtgaaaaagttctaggttcagttgaagttctgatgaagaaacacaattgagattttttcagtgataaaatctgcatatttgtatttcaacaatgtagctaaaacttgatgtaaattcctcctttttttccttttttggcttaatgaatatcatttattcagtatgaaatctttatactatatgttccacgtgttaagaataaatgtacattaaatcttggtaagacttt

SEQ ID NO: 106 - DNA, 8585 bp, Homo sapiens
cagaaagcggagagtcacagcggggccaggccctggggagcggagcctccaccgcccccctcattcccaggcaagggcttggggggaatgagccgggagagccgggtcccgagcctacagagccgggagcagctgagccgccggcgcctcggccgccgccgccgcctcctcctcctccgccgccgccagcccggagcctgagccggcggggcgggggggagaggagcgagcgcagcgcagcagcggagccccgcgaggcccgcccgggcgggtggggagggcagcccgggggactgggccccggggcggggtgggagggggggagaagacgaagacagggccgggtctctccgcggacgagacagcggggatcatggccgcgcaggtcgcccccgccgccgccagcagcctgggcaacccgccgccgccgccgccctcggagctgaagaaagccgagcagcagcagcgggaggaggcggggggcgaggcggcggcggcggcagcggccgagcgcggggaaatgaaggcagccgccgggcaggaaagcgagggccccgccgtggggccgccgcagccgctgggaaaggagctgcaggacggggccgagagcaatgggggtggcggcggcggcggagccggcagcggcggcgggcccggcgcggagccggacctgaagaactcgaacgggaacgcgggccctaggcccgccctgaacaataacctcacggagccgcccggcggcggcggtggcggcagcagcgatggggtgggggcgcctcctcactcagccgcggccgccttgccgcccccagcctacggcttcgggcaaccctacggccggagcccgtctgccgtcgccgccgccgcggccgccgtcttccaccaacaacatggcggacaacaaagccctggcctggcagcgctgcagagcggcggcggcgggggcctggagccctacgcggggccccagcagaactctcacgaccacggcttccccaaccaccagtacaactcctactaccccaaccgcagcgcctaccccccgcccgccccggcctacgcgctgagctccccgagaggtggcactccgggctccggcgcggcggcggctgccggctccaagccgcctccctcctccagcgcctccgcctcctcgtcgtcttcgtccttcgctcagcagcgcttcggggccatggggggaggcggcccctccgcggccggcgggggaactccccagcccaccgccacccccaccctcaaccaactgctcacgtcgcccagctcggcccggggctaccagggctaccccgggggcgactacagtggcgggccccaggacgggggcgccggcaagggcccggcggacatggcctcgcagtgttggggggctgcggcggcggcagctgcggcggcggccgcctcgggaggggcccaacaaaggagccaccacgcgcccatgagccccgggagcagcggcggcggggggcagccgctcgcccggacccctcagccatccagtccaatggatcagatgggcaagatgagacctcagccatatggcgggactaacccatactcgcagcaacagggacctccgtcaggaccgcagcaaggacatgggtacccagggcagccatacgggtcccagaccccgcagcggtacccgatgaccatgcagggccgggcgcagagtgccatgggcggcctctcttatacacagcagattcctccttatggacaacaaggccccagcgggtatggtcaacagggccagactccatattacaaccagcaaagtcctcaccctcagcagcagcagccaccctactcccagcaaccaccgtcccagacccctcatgcccaaccttcgtatcagcagcagccacagtctcaaccaccacagctccagtcctctcagcctccatactcccagcagccatcccagcctccacatcagcagtccccggctccatacccctcccagcagtcgacgacacagcagcacccccagagccagcccccctactcacagccacaggctcagtctccttaccagcagcagcaacctcagcagccagcaccctcgacgctctcccagcaggctgcgtatcctcagccccagtctcagcagtcccagcaaactgcctattcccagcagcgcttccctccaccgcaggagctatctcaagattcatttgggtctcaggcatcctcagccccctcaatgacctccagtaagggagggcaagaagatatgaacctgagccttcagtcaagaccctccagcttgcctgatctatctggttcaatagatgacctccccatggggacagaaggagctctgagtcctggagtgagcacatcagggatttccagcagccaaggagagcagagtaatccagctcagtctcctttctctcctcatacctcccctcacctgcctggcatccgaggcccttccccgtcccctgttggctctcccgccagtgttgctcagtctcgctcaggaccactctcgcctgctgcagtgccaggcaaccagatgccacctcggccacccagtggccagtcggacagcatcatgcatccttccatgaaccaatcaagcattgcccaagatcgaggttatatgcagaggaacccccagatgccccagtacagttccccccagcccggctcagccttatctccgcgtcagccttccggaggacagatacacacaggcatgggctcctaccagcagaactccatggggagctatggtccccaggggggtcagtatggcccacaaggtggctaccccaggcagccaaactataatgccttgcccaatgccaactaccccagtgcaggcatggctggaggcataaaccccatgggtgccggaggtcaaatgcatggacagcctggcatcccaccttatggcacactccctccagggaggatgagtcacgcctccatgggcaaccggccttatggccctaacatggccaatatgccacctcaggttgggtcagggatgtgtcccccaccagggggcatgaaccggaaaacccaagaaactgctgtcgccatgcatgttgctgccaactctatccaaaacaggccgccaggctaccccaatatgaatcaagggggcatgatgggaactggacctccttatggacaagggattaatagtatggctggcatgatcaaccctcagggacccccatattccatgggtggaaccatggccaacaattctgcagggatggcagccagcccagagatgatgggccttggggatgtaaagttaactccagccaccaaaatgaacaacaaggcagatgggacacccaagacagaatccaaatccaagaaatccagttcttctactacaaccaatgagaagatcaccaagttgtatgagctgggtggtgagcctgagaggaagatgtgggtggaccgttatctggccttcactgaggagaaggccatgggcatgacaaatctgcctgctgtgggtaggaaacctctggacctctatcgcctctatgtgtctgtgaaggagattggtggattgactcaggtcaacaagaacaaaaaatggcgggaacttgcaaccaacctcaatgtgggcacatcaagcagtgctgccagctccttgaaaaagcagtatatccagtgtctctatgcctttgaatgcaagattgaacggggagaagaccctcccccagacatctttgcagctgctgattccaagaagtcccagcccaagatccagcctccctctcctgcgggatcaggatctatgcaggggccccagactccccagtcaaccagcagttccatggcagaaggaggagacttaaagccaccaactccagcatccacaccacacagtcagatccccccattgccaggcatgagcaggagcaattcagttgggatccaggatgcctttaatgatggaagtgactccacattccagaagcggaattccatgactccaaaccctgggtatcagcccagtatgaatacctctgacatgatggggcgcatgtcctatgagccaaataaggatccttatggcagcatgaggaaagctccagggagtgatcccttcatgtcctcagggcagggccccaacggcgggatgggtgacccctacagtcgtgctgccggccctgggctaggaaatgtggcgatgggaccacgacagcactatccctatggaggtccttatgacagagtgaggacggagcctggaatagggcctgagggaaacatgagcactggggccccacagccgaatctcatgccttccaacccagactcggggatgtattctcctagccgctaccccccgcagcagcagcagcagcagcagcaacgacatgattcctatggcaatcagttctccacccaaggcaccccttctggcagccccttccccagccagcagactacaatgtatcaacagcaacagcagaattacaagcggccaatggatggcacatatggccctcctgccaagcggcacgaaggggagatgtacagcgtgccatacagcactgggcaggggcagcctcagcagcagcagttgcccccagcccagccccagcctgccagccagcaacaagctgcccagccttcccctcagcaagatgtatacaaccagtatggcaatgcctatcctgccactgccacagctgctactgagcgccgaccagcaggcggcccccagaaccaatttccattccagtttggccgagaccgtgtctctgcaccccctggcaccaatgcccagcaaaacatgccaccacaaatgatgggcggccccatacaggcatcagctgaggttgctcagcaaggcaccatgtggcaggggcgtaatgacatgacctataattatgccaacaggcagagcacgggctctgccccccagggccccgcctatcatggcgtgaaccgaacagatgaaatgctgcacacagatcagagggccaaccacgaaggctcgtggccttcccatggcacacgccagcccccatatggtccctctgcccctgtgccccccatgacaaggccccctccatctaactaccagcccccaccaagcatgcagaatcacattcctcaggtatccagccctgctcccctgccccggccaatggagaaccgcacctctcctagcaagtctccattcctgcactctgggatgaaaatgcagaaggcaggtcccccagtacctgcctcgcacatagcacctgcccctgtgcagccccccatgattcggcgggatatcaccttcccacctggctctgttgaagccacacagcctgtgttgaagcagaggaggcggctcacaatgaaagacattggaaccccggaggcatggcgggtaatgatgtccctcaagtctggtctcctggcagagagcacatgggcattagataccatcaacatcctgctgtatgatgacaacagcatcatgaccttcaacctcagtcagctcccagggttgctagagctccttgtagaatatttccgacgatgcctgattgagatctttggcattttaaaggagtatgaggtgggtgacccaggacagagaacgctactggatcctgggaggttcagcaaggtgtctagtccagctcccatggagggtggggaagaagaagaagaacttctaggtcctaaactagaagaggaagaagaagaggaagtagttgaaaatgatgaggagatagccttttcaggcaaggacaagccagcttcagagaatagtgaggagaagctgatcagtaagtttgacaagcttccagtaaagatcgtacagaagaatgatccatttgtggtggactgctcagataagcttgggcgtgtgcaggagtttgacagtggcctgctgcactggcggattggtgggggggacaccactgagcatatccagacccacttcgagagcaagacagagctgctgccttcccggcctcacgcaccctgcccaccagcccctcggaagcatgtgacaacagcagagggtacaccagggacaacagaccaggaggggcccccacctgatggacctccagaaaaacggatcacagccactatggatgacatgttgtctactcggtctagcaccttgaccgaggatggagctaagagttcagaggccatcaaggagagcagcaagtttccatttggcattagcccagcacagagccaccggaacatcaagatcctagaggacgaaccccacagtaaggatgagaccccactgtgtacccttctggactggcaggattctcttgccaagcgctgcgtctgtgtgtccaataccattcgaagcctgtcatttgtgccaggcaatgactttgagatgtccaaacacccagggctgctgctcatcctgggcaagctgatcctgctgcaccacaagcacccagaacggaagcaggcaccactaacttatgaaaaggaggaggaacaggaccaaggggtgagctgcaacaaagtggagtggtggtgggactgcttggagatgctccgggaaaacaccttggttacactcgccaacatctcggggcagttggacctatctccataccccgagagcatttgcctgcctgtcctggacggactcctacactgggcagtttgcccttcagctgaagcccaggaccccttttccaccctgggccccaatgccgtcctttccccgcagagactggtcttggaaaccctcagcaaactcagcatccaggacaacaatgtggacctgattctggccacaccccccttcagccgcctggagaagttgtatagcactatggtgcgcttcctcagtgactgaaagaacccggtgtgccgggagatggctgtggtactgctggccaacctggctcagggggacagcctggcagctcgtgccattgcagtgcagaagggcagtatcggcaacctcctgggcttcctagaggacagccttgccgccacacagttccagcagagccaggccagcctcctccacatgcagaacccaccctttgagccaactagtgtggacatgatgcggcgggctgcccgcgcgctgcttgccttggccaaggtggacgagaaccactcagagtttactctgtacgaatcacggctgttggacatctcggtatcaccgttgatgaactcattggtttcacaagtcatttgtgatgtactgtttttgattggccagtcatgacagccgtgggacacctcccccccccgtgtgtgtgtgcgtgtgtggagaacttagaaactgactgttgccctttatttatgcaaaaccacctcagaatccagtttaccctgtgctgtccagcttctcccttgggaaaaagtctctcctgtttctctctcctccttccacctcccctccctccatcacctcacgcctttctgttccttgtcctcaccttactcccctcaggaccctaccccaccctctttgaaaagacaaagctctgcctacatagaagactttttttattttaaccaaagttactgttgtttacagtgagtttggggaaaaaaaataaaataaaaatggctttcccagtccttgcatcaacgggatgccacatttcataactgtttttaatggtaaaaaaaaaaaaaaaaaatacaaaaaaaaattctgaaggacaaaaaaggtgactgctgaactgtgtgtggtttattgttgtacattcacaatcttgcaggagccaagaagttcgcagttgtgaacagaccctgttcactggagaggcctgtgcagtagagtgtagaccctttcatgtactgtactgtacacctgatactgtaaacatactgtaataataatgtctcacatggaaacagaaaacgctgggtcagcagcaagctgtagtttttaaaaatgtttttagttaaacgttgaggagaaaaaaaaaaaaggcttttcccccaaagtatcatgtgtgaacctacaacaccctgacctctttctctcctccttgattgtatgaataaccctgagatcacctcttagaactggttttaacctttagctgcagcggctacgctgccacgtgtgtatatatatgacgttgtacattgcacatacccttggatccccacagtttggtcctcctcccagctacccctttatagtatgacgagttaacaagttggtgacctgcacaaagcgagacacagctatttaatctcttgccagatatcgcccctcttggtgcgatgctgtacaggtctctgtaaaaagtccttgctgtctcagcagccaatcaacttatagtttatttttttctgggtttttgttttgttttgttttctttctaatcgaggtgtgaaaaagttctaggttcagttgaagttctgatgaagaaacacaattgagattttttcagtgataaaatctgcatatttgtatttcaacaatgtagctaaaacttgatgtaaattcctcctttttttccttttttggcttaatgaatatcatttattcagtatgaaatctttatactatatgttccacgtgttaagaataaatgtacattaaatcttggtaagacttt

SEQ ID NO: 107 - DNA, 8585 bp, Homo sapiens
cagaaagcggagagtcacagcggggccaggccctggggagcggagcctccaccgcccccctcattcccaggcaagggcttggggggaatgagccgggagagccgggtcccgagcctacagagccgggagcagctgagccgccggcgcctcggccgccgccgccgcctcctcctcctccgccgccgccagcccggagcctgagccggcggggcgggggggagaggagcgagcgcagcgcagcagcggagccccgcgaggcccgcccgggcgggtggggagggcagcccgggggactgggccccggggcggggtgggagggggggagaagacgaagacagggccgggtctctccgcggacgagacagcggggatcatggccgcgcaggtcgcccccgccgccgccagcagcctgggcaacccgccgccgccgccgccctcggagctgaagaaagccgagcagcagcagcgggaggaggcggggggcgaggcggcggcggcggcagcggccgagcgcggggaaatgaaggcagccgccgggcaggaaagcgagggccccgccgtggggccgccgcagccgctgggaaaggagctgcaggacggggccgagagcaatgggggtggcggcggcggcggagccggcagcggcggcgggcccggcgcggagccggacctgaagaactcgaacgggaacgcgggccctaggcccgccctgaacaataacctcacggggccgcccggcggcggcggtggcggcagcagcgatggggtgggggcgcctcctcactcagccgcggccgccttgccgcccccagcctacggcttcgggcaaccctacggccggagcccgtctgccgtcgccgccgccgcggccgccgtcttccaccaacaacatggcggacaacaaagccctggcctggcagcgctgcagagcggcggcggcgggggcctggagccctacgcggggccccagcagaactctcacgaccacggcttccccaaccaccagtacaactcctactaccccaaccgcagcgcctaccccccgcccgccccggcctacgcgctgagctccccgagaggtggcactccgggctccggcgcggcggcggctgccggctccaagccgcctccctcctccagcgcctccgcctcctcgtcgtcttcgtccttcgctcagcagcgcttcggggccatggggggaggcggcccctccgcggccggcgggggaactccccagcccaccgccacccccaccctcaaccaactgctcacgtcgcccagctcggcccggggctaccagggctaccccgggggcgactacagtggcgggccccaggacgggggcgccggcaagggcccggcggacatggcctcgcagtgttggggggctgcggcggcggcagctgcggcggcggccgcctcgggaggggcccaacaaaggagccaccacgcgcccatgagccccgggagcagcggcggcggggggcagccgctcgcccggacccctcagccatccagtccaatggatcagatgggcaagatgagacctcagccatatggcgggactaacccatactcgcagcaacagggacctccgtcaggaccgcagcaaggacatgggtacccagggcagccatacgggtcccagaccccgcagcggtacccgatgaccatgcagggccgggcgcagagtgccatgggcggcctctcttatacacagcagattcctccttatggacaacaaggccccagcgggtatggtcaacagggccagactccatattacaaccagcaaagtcctcaccctcagcagcagcagccaccctactcccagcaaccaccgtcccagacccctcatgcccaaccttcgtatcagcagcagccacagtctcaaccaccacagctccagtcctctcagcctccatactcccagcagccatcccagcctccacatcagcagtccccggctccatacccctcccagcagtcgacgacacagcagcacccccagagccagcccccctactcacagccacaggctcagtctccttaccagcagcagcaacctcagcagccagcaccctcgacgctctcccagcaggctgcgtatcctcagccccagtctcagcagtcccagcaaactgcctattcccagcagcgcttccctccaccgcaggagctatctcaagattcatttgggtctcaggcatcctcagccccctcaatgacctccagtaagggagggcaagaagatatgaacctgagccttcagtcaagaccctccagcttgcctgatctatctggttcaatagatgacctccccatggggacagaaggagctctgagtcctggagtgagcacatcagggatttccagcagccaaggagagcagagtaatccagctcagtctcctttctctcctcatacctcccctcacctgcctggcatccgaggcccttccccgtcccctgttggctctcccgccagtgttgctcagtctcgctcaggaccactctcgcctgctgcagtgccaggcaaccagatgccacctcggccacccagtggccagtcggacagcatcatgcatccttccatgaaccaatcaagcattgcccaagatcgaggttatatgcagaggaacccccagatgccccagtacagttccccccagcccggctcagccttatctccgcgtcagccttccggaggacagatacacacaggcatgggctcctaccagcagaactccatggggagctatggtccccaggggggtcagtatggcccacaaggtggctaccccaggcagccaaactataatgccttgcccaatgccaactaccccagtgcaggcatggctggaggcataaaccccatgggtgccggaggtcaaatgcatggacagcctggcatcccaccttatggcacactccctccagggaggatgagtcacgcctccatgggcaaccggccttatggccctaacatggccaatatgccacctcaggttgggtcagggatgtgtcccccaccagggggcatgaaccggaaaacccaagaaactgctgtcgccatgcatgttgctgccaactctatccaaaacaggccgccaggctaccccaatatgaatcaagggggcatgatgggaactggacctccttatggacaagggattaatagtatggctggcatgatcaaccctcagggacccccatattccatgggtggaaccatggccaacaattctgcagggatggcagccagcccagagatgatgggccttggggatgtaaagttaactccagccaccaaaatgaacaacaaggcagatgggacacccaagacagaatccaaatccaagaaatccagttcttctactacaaccaatgagaagatcaccaagttgtatgagctgggtggtgagcctgagaggaagatgtgggtggaccgttatctggccttcactgaggagaaggccatgggcatgacaaatctgcctgctgtgggtaggaaacctctggacctctatcgcctctatgtgtctgtgaaggagattggtggattgactcaggtcaacaagaacaaaaaatggcgggaacttgcaaccaacctcaatgtgggcacatcaagcagtgctgccagctccttgaaaaagcagtatatccagtgtctctatgcctttgaatgcaagattgaacggggagaagaccctcccccagacatctttgcagctgctgattccaagaagtcccagcccaagatccagcctccctctcctgcgggatcaggatctatgcaggggccccagactccccagtcaaccagcagttccatggcagaaggaggagacttaaagccaccaactccagcatccacaccacacagtcagatccccccattgccaggcatgagcaggagcaattcagttgggatccaggatgcctttaatgatggaagtgactccacattccagaagcggaattccatgactccaaaccctgggtatcagcccagtatgaatacctctgacatgatggggcgcatgtcctatgagccaaataaggatccttatggcagcatgaggaaagctccagggagtgatcccttcatgtcctcagggcagggccccaacggcgggatgggtgacccctacagtcgtgctgccggccctgggctaggaaatgtggcgatgggaccacgacagcactatccctatggaggtccttatgacagagtgaggacggagcctggaatagggcctgagggaaacatgagcactggggccccacagccgaatctcatgccttccaacccagactcggggatgtattctcctagccgctaccccccgcagcagcagcagcagcagcagcaacgacatgattcctatggcaatcagttctccacccaaggcaccccttctggcagccccttccccagccagcagactacaatgtatcaacagcaacagcagaattacaagcggccaatggatggcacatatggccctcctgccaagcggcacgaaggggagatgtacagcgtgccatacagcactgggcaggggcagcctcagcagcagcagttgcccccagcccagccccagcctgccagccagcaacaagctgcccagccttcccctcagcaagatgtatacaaccagtatggcaatgcctatcctgccactgccacagctgctactgagcgccgaccagcaggcggcccccagaaccaatttccattccagtttggccgagaccgtgtctctgcaccccctggcaccaatgcccagcaaaacatgccaccacaaatgatgggcggccccatacaggcatcagctgaggttgctcagcaaggcaccatgtggcaggggcgtaatgacatgacctataattatgccaacaggcagagcacgggctctgccccccagggccccgcctatcatggcgtgaaccgaacagatgaaatgctgcacacagatcagagggccaaccacgaaggctcgtggccttcccatggcacacgccagcccccatatggtccctctgcccctgtgccccccatgacaaggccccctccatctaactaccagcccccaccaagcatgcagaatcacattcctcaggtatccagccctgctcccctgccccggccaatggagaaccgcacctctcctagcaagtctccattcctgcactctgggatgaaaatgcagaaggcaggtcccccagtacctgcctcgcacatagcacctgcccctgtgcagccccccatgattcggcgggatatcaccttcccacctggctctgttgaagccacacagcctgtgttgaagcagaggaggcggctcacaatgaaagacattggaaccccggaggcatggcgggtaatgatgtccctcaagtctggtctcctggcagagagcacatgggcattagataccatcaacatcctgctgtatgatgacaacagcatcatgaccttcaacctcagtcagctcccagggttgctagagctccttgtagaatatttccgacgatgcctgattgagatctttggcattttaaaggagtatgaggtgggtgacccaggacagagaacgctactggatcctgggaggttcagcaaggtgtctagtccagctcccatggagggtggggaagaagaagaagaacttctaggtcctaaactagaagaggaagaagaagaggaagtagttgaaaatgatgaggagatagccttttcaggcaaggacaagccagcttcagagaatagtgaggagaagctgatcagtaagtttgacaagcttccagtaaagatcgtacagaagaatgatccatttgtggtggactgctcagataagcttgggcgtgtgcaggagtttgacagtggcctgctgcactggcggattggtgggggggacaccactgagcatatccagacccacttcgagagcaagacagagctgctgccttcccggcctcacgcaccctgcccaccagcccctcggaagcatgtgacaacagcagagggtacaccagggacaacagaccaggaggggcccccacctgatggacctccagaaaaacggatcacagccactatggatgacatgttgtctactcggtctagcaccttgaccgaggatggagctaagagttcagaggccatcaaggagagcagcaagtttccatttggcattagcccagcacagagccaccggaacatcaagatcctagaggacgaaccccacagtaaggatgagaccccactgtgtacccttctggactggcaggattctcttgccaagcgctgcgtctgtgtgtccaataccattcgaagcctgtcatttgtgccaggcaatgactttgagatgtccaaacacccagggctgctgctcatcctgggcaagctgatcctgctgcaccacaagcacccagaacggaagcaggcaccactaacttatgaaaaggaggaggaacaggaccaaggggtgagctgcaacaaagtggagtggtggtgggactgcttggagatgctccgggaaaacaccttggttacactcgccaacatctcggggcagttggacctatctccataccccgagagcatttgcctgcctgtcctggacggactcctacactgggcagtttgcccttcagctgaagcccaggaccccttttccaccctgggccccaatgccgtcctttccccgcagagactggtcttggaaaccctcagcaaactcagcatccaggacaacaatgtggacctgattctggccacaccccccttcagccgcctggagaagttgtatagcactatggtgcgcttcctcagtgaccgaaagaacccggtgtgccgggagatggctgtggtactgctggccaacctggctcagggggacagcctggcagctcgtgccattgcagtgcagaagggcagtatcggcaacctcctgggcttcctagaggacagccttgccgccacacagttccagcagagccaggccagcctcctccacatgcagaacccaccctttgagccaactagtgtggacatgatgcggcgggctgcccgcgcgctgcttgccttggccaaggtggacgagaaccactcagagtttactctgtacgaatcacggctgttggacatctcggtatcaccgttgatgaactcattggtttcacaagtcatttgtgatgtactgtttttgattggccagtcatgacagccgtgggacacctcccccccccgtgtgtgtgtgcgtgtgtggagaacttagaaactgactgttgccctttatttatgcaaaaccacctcagaatccagtttaccctgtgctgtccagcttctcccttgggaaaaagtctctcctgtttctctctcctccttccacctcccctccctccatcacctcacgcctttctgttccttgtcctcaccttactcccctcaggaccctaccccaccctctttgaaaagacaaagctctgcctacatagaagactttttttattttaaccaaagttactgttgtttacagtgagtttggggaaaaaaaataaaataaaaatggctttcccagtccttgcatcaacgggatgccacatttcataactgtttttaatggtaaaaaaaaaaaaaaaaaatacaaaaaaaaattctgaaggacaaaaaaggtgactgctgaactgtgtgtggtttattgttgtacattcacaatcttgcaggagccaagaagttcgcagttgtgaacagaccctgttcactggagaggcctgtgcagtagagtgtagaccctttcatgtactgtactgtacacctgatactgtaaacatactgtaataataatgtctcacatggaaacagaaaacgctgggtcagcagcaagctgtagtttttaaaaatgtttttagttaaacgttgaggagaaaaaaaaaaaaggcttttcccccaaagtatcatgtgtgaacctacaacaccctgacctctttctctcctccttgattgtatgaataaccctgagatcacctcttagaactggttttaacctttagctgcagcggctacgctgccacgtgtgtatatatatgacgttgtacattgcacatacccttggatccccacagtttggtcctcctcccagctacccctttatagtatgacgagttaacaagttggtgacctgcacaaagcgagacacagctatttaatctcttgccagatatcgcccctcttggtgcgatgctgtacaggtctctgtaaaaagtccttgctgtctcagcagccaatcaacttatagtttatttttttctgggtttttgttttgttttgttttctttctaatcgaggtgtgaaaaagttctaggttcagttgaagttctgatgaagaaacacaattgagattttttcagtgataaaatctgcatatttgtatttcaacaatgtagctaaaacttgatgtaaattcctcctttttttccttttttggcttaatgaatatcatttattcagtatgaaatctttatactatatgttccacgtgttaagaataaatgtacattaaatcttggtaagacttt

SEQ ID NO: 108 - DNA, 8585 bp, Homo sapiens
cagaaagcggagagtcacagcggggccaggccctggggagcggagcctccaccgcccccctcattcccaggcaagggcttggggggaatgagccgggagagccgggtcccgagcctacagagccgggagcagctgagccgccggcgcctcggccgccgccgccgcctcctcctcctccgccgccgccagcccggagcctgagccggcggggcgggggggagaggagcgagcgcagcgcagcagcggagccccgcgaggcccgcccgggcgggtggggagggcagcccgggggactgggccccggggcggggtgggagggggggagaagacgaagacagggccgggtctctccgcggacgagacagcggggatcatggccgcgcaggtcgcccccgccgccgccagcagcctgggcaacccgccgccgccgccgccctcggagctgaagaaagccgagcagcagcagcgggaggaggcggggggcgaggcggcggcggcggcagcggccgagcgcggggaaatgaaggcagccgccgggcaggaaagcgagggccccgccgtggggccgccgcagccgctgggaaaggagctgcaggacggggccgagagcaatgggggtggcggcggcggcggagccggcagcggcggcgggcccggcgcggagccggacctgaagaactcgaacgggaacgcgggccctaggcccgccctgaacaataacctcacggagccgcccggcggcggcggtggcggcagcagcgatggggtgggggcgcctcctcactcagccgcggccgccttgccgcccccagcctacggcttcgggcaaccctacggccggagcccgtctgccgtcgccgccgccgcggccgccgtcttccaccaacaacatggcggacaacaaagccctggcctggcagcgctgcagagcggcggcggcgggggcctggagccctacgcggggccccagcagaactctcacgaccacggcttccccaaccaccagtacaactcctaataccccaaccgcagcgcctaccccccgcccgccccggcctacgcgctgagctccccgagaggtggcactccgggctccggcgcggcggcggctgccggctccaagccgcctccctcctccagcgcctccgcctcctcgtcgtcttcgtccttcgctcagcagcgcttcggggccatggggggaggcggcccctccgcggccggcgggggaactccccagcccaccgccacccccaccctcaaccaactgctcacgtcgcccagctcggcccggggctaccagggctaccccgggggcgactacagtggcgggccccaggacgggggcgccggcaagggcccggcggacatggcctcgcagtgttggggggctgcggcggcggcagctgcggcggcggccgcctcgggaggggcccaacaaaggagccaccacgcgcccatgagccccgggagcagcggcggcggggggcagccgctcgcccggacccctcagccatccagtccaatggatcagatgggcaagatgagacctcagccatatggcgggactaacccatactcgcagcaacagggacctccgtcaggaccgcagcaaggacatgggtacccagggcagccatacgggtcccagaccccgcagcggtacccgatgaccatgcagggccgggcgcagagtgccatgggcggcctctcttatacacagcagattcctccttatggacaacaaggccccagcgggtatggtcaacagggccagactccatattacaaccagcaaagtcctcaccctcagcagcagcagccaccctactcccagcaaccaccgtcccagacccctcatgcccaaccttcgtatcagcagcagccacagtctcaaccaccacagctccagtcctctcagcctccatactcccagcagccatcccagcctccacatcagcagtccccggctccatacccctcccagcagtcgacgacacagcagcacccccagagccagcccccctactcacagccacaggctcagtctccttaccagcagcagcaacctcagcagccagcaccctcgacgctctcccagcaggctgcgtatcctcagccccagtctcagcagtcccagcaaactgcctattcccagcagcgcttccctccaccgcaggagctatctcaagattcatttgggtctcaggcatcctcagccccctcaatgacctccagtaagggagggcaagaagatatgaacctgagccttcagtcaagaccctccagcttgcctgatctatctggttcaatagatgacctccccatggggacagaaggagctctgagtcctggagtgagcacatcagggatttccagcagccaaggagagcagagtaatccagctcagtctcctttctctcctcatacctcccctcacctgcctggcatccgaggcccttccccgtcccctgttggctctcccgccagtgttgctcagtctcgctcaggaccactctcgcctgctgcagtgccaggcaaccagatgccacctcggccacccagtggccagtcggacagcatcatgcatccttccatgaaccaatcaagcattgcccaagatcgaggttatatgcagaggaacccccagatgccccagtacagttccccccagcccggctcagccttatctccgcgtcagccttccggaggacagatacacacaggcatgggctcctaccagcagaactccatggggagctatggtccccaggggggtcagtatggcccacaaggtggctaccccaggcagccaaactataatgccttgcccaatgccaactaccccagtgcaggcatggctggaggcataaaccccatgggtgccggaggtcaaatgcatggacagcctggcatcccaccttatggcacactccctccagggaggatgagtcacgcctccatgggcaaccggccttatggccctaacatggccaatatgccacctcaggttgggtcagggatgtgtcccccaccagggggcatgaaccggaaaacccaagaaactgctgtcgccatgcatgttgctgccaactctatccaaaacaggccgccaggctaccccaatatgaatcaagggggcatgatgggaactggacctccttatggacaagggattaatagtatggctggcatgatcaaccctcagggacccccatattccatgggtggaaccatggccaacaattctgcagggatggcagccagcccagagatgatgggccttggggatgtaaagttaactccagccaccaaaatgaacaacaaggcagatgggacacccaagacagaatccaaatccaagaaatccagttcttctactacaaccaatgagaagatcaccaagttgtatgagctgggtggtgagcctgagaggaagatgtgggtggaccgttatctggccttcactgaggagaaggccatgggcatgacaaatctgcctgctgtgggtaggaaacctctggacctctatcgcctctatgtgtctgtgaaggagattggtggattgactcaggtcaacaagaacaaaaaatggcgggaacttgcaaccaacctcaatgtgggcacatcaagcagtgctgccagctccttgaaaaagcagtatatccagtgtctctatgcctttgaatgcaagattgaacggggagaagaccctcccccagacatctttgcagctgctgattccaagaagtcccagcccaagatccagcctccctctcctgcgggatcaggatctatgcaggggccccagactccccagtcaaccagcagttccatggcagaaggaggagacttaaagccaccaactccagcatccacaccacacagtcagatccccccattgccaggcatgagcaggagcaattcagttgggatccaggatgcctttaatgatggaagtgactccacattccagaagcggaattccatgactccaaaccctgggtatcagcccagtatgaatacctctgacatgatggggcgcatgtcctatgagccaaataaggatccttatggcagcatgaggaaagctccagggagtgatcccttcatgtcctcagggcagggccccaacggcgggatgggtgacccctacagtcgtgctgccggccctgggctaggaaatgtggcgatgggaccacgacagcactatccctatggaggtccttatgacagagtgaggacggagcctggaatagggcctgagggaaacatgagcactggggccccacagccgaatctcatgccttccaacccagactcggggatgtattctcctagccgctaccccccgcagcagcagcagcagcagcagcaacgacatgattcctatggcaatcagttctccacccaaggcaccccttctggcagccccttccccagccagcagactacaatgtatcaacagcaacagcagaattacaagcggccaatggatggcacatatggccctcctgccaagcggcacgaaggggagatgtacagcgtgccatacagcactgggcaggggcagcctcagcagcagcagttgcccccagcccagccccagcctgccagccagcaacaagctgcccagccttcccctcagcaagatgtatacaaccagtatggcaatgcctatcctgccactgccacagctgctactgagcgccgaccagcaggcggcccccagaaccaatttccattccagtttggccgagaccgtgtctctgcaccccctggcaccaatgcccagcaaaacatgccaccacaaatgatgggcggccccatacaggcatcagctgaggttgctcagcaaggcaccatgtggcaggggcgtaatgacatgacctataattatgccaacaggcagagcacgggctctgccccccagggccccgcctatcatggcgtgaaccgaacagatgaaatgctgcacacagatcagagggccaaccacgaaggctcgtggccttcccatggcacacgccagcccccatatggtccctctgcccctgtgccccccatgacaaggccccctccatctaactaccagcccccaccaagcatgcagaatcacattcctcaggtatccagccctgctcccctgccccggccaatggagaaccgcacctctcctagcaagtctccattcctgcactctgggatgaaaatgcagaaggcaggtcccccagtacctgcctcgcacatagcacctgcccctgtgcagccccccatgattcggcgggatatcaccttcccacctggctctgttgaagccacacagcctgtgttgaagcagaggaggcggctcacaatgaaagacattggaaccccggaggcatggcgggtaatgatgtccctcaagtctggtctcctggcagagagcacatgggcattagataccatcaacatcctgctgtatgatgacaacagcatcatgaccttcaacctcagtcagctcccagggttgctagagctccttgtagaatatttccgacgatgcctgattgagatctttggcattttaaaggagtatgaggtgggtgacccaggacagagaacgctactggatcctgggaggttcagcaaggtgtctagtccagctcccatggagggtggggaagaagaagaagaacttctaggtcctaaactagaagaggaagaagaagaggaagtagttgaaaatgatgaggagatagccttttcaggcaaggacaagccagcttcagagaatagtgaggagaagctgatcagtaagtttgacaagcttccagtaaagatcgtacagaagaatgatccatttgtggtggactgctcagataagcttgggcgtgtgcaggagtttgacagtggcctgctgcactggcggattggtgggggggacaccactgagcatatccagacccacttcgagagcaagacagagctgctgccttcccggcctcacgcaccctgcccaccagcccctcggaagcatgtgacaacagcagagggtacaccagggacaacagaccaggaggggcccccacctgatggacctccagaaaaacggatcacagccactatggatgacatgttgtctactcggtctagcaccttgaccgaggatggagctaagagttcagaggccatcaaggagagcagcaagtttccatttggcattagcccagcacagagccaccggaacatcaagatcctagaggacgaaccccacagtaaggatgagaccccactgtgtacccttctggactggcaggattctcttgccaagcgctgcgtctgtgtgtccaataccattcgaagcctgtcatttgtgccaggcaatgactttgagatgtccaaacacccagggctgctgctcatcctgggcaagctgatcctgctgcaccacaagcacccagaacggaagcaggcaccactaacttatgaaaaggaggaggaacaggaccaaggggtgagctgcaacaaagtggagtggtggtgggactgcttggagatgctccgggaaaacaccttggttacactcgccaacatctcggggcagttggacctatctccataccccgagagcatttgcctgcctgtcctggacggactcctacactgggcagtttgcccttcagctgaagcccaggaccccttttccaccctgggccccaatgccgtcctttccccgcagagactggtcttggaaaccctcagcaaactcagcatccaggacaacaatgtggacctgattctggccacaccccccttcagccgcctggagaagttgtatagcactatggtgcgcttcctcagtgaccgaaagaacccggtgtgccgggagatggctgtggtactgctggccaacctggctcagggggacagcctggcagctcgtgccattgcagtgcagaagggcagtatcggcaacctcctgggcttcctagaggacagccttgccgccacacagttccagcagagccaggccagcctcctccacatgcagaacccaccctttgagccaactagtgtggacatgatgcggcgggctgcccgcgcgctgcttgccttggccaaggtggacgagaaccactcagagtttactctgtacgaatcacggctgttggacatctcggtatcaccgttgatgaactcattggtttcacaagtcatttgtgatgtactgtttttgattggccagtcatgacagccgtgggacacctcccccccccgtgtgtgtgtgcgtgtgtggagaacttagaaactgactgttgccctttatttatgcaaaaccacctcagaatccagtttaccctgtgctgtccagcttctcccttgggaaaaagtctctcctgtttctctctcctccttccacctcccctccctccatcacctcacgcctttctgttccttgtcctcaccttactcccctcaggaccctaccccaccctctttgaaaagacaaagctctgcctacatagaagactttttttattttaaccaaagttactgttgtttacagtgagtttggggaaaaaaaataaaataaaaatggctttcccagtccttgcatcaacgggatgccacatttcataactgtttttaatggtaaaaaaaaaaaaaaaaaatacaaaaaaaaattctgaaggacaaaaaaggtgactgctgaactgtgtgtggtttattgttgtacattcacaatcttgcaggagccaagaagttcgcagttgtgaacagaccctgttcactggagaggcctgtgcagtagagtgtagaccctttcatgtactgtactgtacacctgatactgtaaacatactgtaataataatgtctcacatggaaacagaaaacgctgggtcagcagcaagctgtagtttttaaaaatgtttttagttaaacgttgaggagaaaaaaaaaaaaggcttttcccccaaagtatcatgtgtgaacctacaacaccctgacctctttctctcctccttgattgtatgaataaccctgagatcacctcttagaactggttttaacctttagctgcagcggctacgctgccacgtgtgtatatatatgacgttgtacattgcacatacccttggatccccacagtttggtcctcctcccagctacccctttatagtatgacgagttaacaagttggtgacctgcacaaagcgagacacagctatttaatctcttgccagatatcgcccctcttggtgcgatgctgtacaggtctctgtaaaaagtccttgctgtctcagcagccaatcaacttatagtttatttttttctgggtttttgttttgttttgttttctttctaatcgaggtgtgaaaaagttctaggttcagttgaagttctgatgaagaaacacaattgagattttttcagtgataaaatctgcatatttgtatttcaacaatgtagctaaaacttgatgtaaattcctcctttttttccttttttggcttaatgaatatcatttattcagtatgaaatctttatactatatgttccacgtgttaagaataaatgtacattaaatcttggtaagacttt

SEQ ID NO: 109 - DNA, 8584 bp, Homo sapiens
cagaaagcggagagtcacagcggggccaggccctggggagcggagcctccaccgcccccctcattcccaggcaagggcttggggggaatgagccgggagagccgggtcccgagcctacagagccgggagcagctgagccgccggcgcctcggccgccgccgccgcctcctcctcctccgccgccgccagcccggagcctgagccggcggggcgggggggagaggagcgagcgcagcgcagcagcggagccccgcgaggcccgcccgggcgggtggggagggcagcccgggggactgggccccggggcggggtgggagggggggagaagacgaagacagggccgggtctctccgcggacgagacagcggggatcatggccgcgcaggtcgcccccgccgccgccagcagcctgggcaacccgccgccgccgccgccctcggagctgaagaaagccgagcagcagcagcgggaggaggcggggggcgaggcggcggcggcggcagcggccgagcgcggggaaatgaaggcagccgccgggcaggaaagcgagggccccgccgtggggccgccgcagccgctgggaaaggagctgcaggacggggccgagagcaatgggggtggcggcggcggcggagccggcagcggcggcgggcccggcgcggagccggacctgaagaactcgaacgggaacgcgggccctaggcccgccctgaacaataacctcacggagccgcccggcggcggcggtggcggcagcagcgatggggtgggggcgcctcctcactcagccgcggccgccttgccgcccccagcctacggcttcgggcaaccctacggccggagcccgtctgccgtcgccgccgccgcggccgccgtcttccaccaacaacatggcggacaacaaagccctggcctggcagcgctgcagagcggcggcggcgggggcctggagccctacgcggggccccagcagaactctcacgaccacggcttccccaaccaccagtacaactcctactaccccaaccgcagcgcctaccccccgcccgccccggcctacgcgctgagctccccgagaggtggcactccgggctccggcgcggcggcggctgccggctccaagccgcctccctcctccagcgcctccgcctcctcgtcgtcttcgtccttcgctcagcagcgcttcggggccatggggggaggcggcccctccgcggccggcgggggaactccccagcccaccgccacccccaccctcaaccaactgctcacgtcgcccagctcggcccggggctaccagggctaccccgggggcgactacagtggcgggccccaggacgggggcgccggcaagggcccggcggacatggcctcgcagtgttggggggctgcggcggcggcagctgcggcggcggccgcctcgggaggggcccaacaaaggagccaccacgcgcccatgagccccgggagcagcggcggcggggggcagccgctcgcccggacccctcagccatccagtccaatggatcagatgggcaagatgagacctcagccatatggcgggactaacccatactcgcagcaacagggacctccgtcaggaccgcagcaaggacatgggtacccagggcagccatacgggtcccagaccccgcagcggtacccgatgaccatgcagggccgggcgcagagtgccatgggcggcctctcttatacacagcagattcctccttatggacaacaaggccccagcgggtatggtcaacagggccagactccatattacaaccagcaaagtcctcaccctcagcagcagcagccaccctactcccagcaaccaccgtcccagacccctcatgcccaaccttcgtatcagcagcagccacagtctcaaccaccacagctccagtcctctcagcctccatactcccagcagccatcccagcctccacatcagcagtccccggctccatacccctcccagcagtcgacgacacagcagcacccccagagccagcccccctactcacagccacaggctcagtctccttaccagcagcagcaacctcagcagccagcaccctcgacgctctcccagcaggctgcgtatcctcagccccagtctcagcagtcccagcaaactgcctattcccagcagcgcttccctccaccgcaggagctatctcaagattcatttgggtctcaggcatcctcagccccctcaatgacctccagtaagggagggcaagaagatatgaacctgagccttcagtcaagaccctccagcttgcctgatctatctggttcaatagatgacctccccatggggacagaaggagctctgagtcctggagtgagcacatcagggatttccagcagccaaggagagcagagtaatccagctcagtctcctttctctcctcatacctcccctcacctgcctggcatccgaggcccttccccgtcccctgttggctctcccgccagtgttgctcagtctcgctcaggaccactctcgcctgctgcagtgccaggcaaccagatgccacctcggccacccagtggccagtcggacagcatcatgcatccttccatgaaccaatcaagcattgcccaagatcgaggttatatgcagaggaacccccagatgccccagtacagttccccccagcccggctcagccttatctccgcgtcagccttccggaggacagatacacacaggcatgggctcctaccagcagaactccatggggagctatggtccccaggggggtcagtatggcccacaaggtggctaccccaggcagccaaactataatgccttgcccaatgccaactaccccagtgcaggcatggctggaggcataaaccccatgggtgccggaggtcaaatgcatggacagcctggcatcccaccttatggcacactccctccagggaggatgagtcacgcctccatgggcaaccggccttatggccctaacatggccaatatgccacctcaggttgggtcagggatgtgtcccccaccagggggcatgaaccggaaaacccaagaaactgctgtcgccatgcatgttgctgccaactctatccaaaacaggccgccaggctaccccaatatgaatcaagggggcatgatgggaactggacctccttatggacaagggattaatagtatggctggcatgatcaaccctcagggacccccatattccatgggtggaaccatggccaacaattctgcagggatggcagccagcccagagatgatgggccttggggatgtaaagttaactccagccaccaaaatgaacaacaaggcagatgggacacccaagacagaatccaaatccaagaaatccagttcttctactacaaccaatgagaagatcaccaagttgtatgagctgggtggtgagcctgagaggaagatgtgggtggaccgttatctggccttcactgaggagaaggccatgggcatgacaaatctgcctgctgtgggtaggaaacctctggacctctatcgcctctatgtgtctgtgaaggagattggtggattgactcaggtcaacaagaacaaaaaatggcgggaacttgcaaccaacctcaatgtgggcacatcaagcagtgctgccagctccttgaaaaagcagtatatccagtgtctctatgcctttgaatgcaagattgaacggggagaagaccctcccccagacatctttgcagctgctgattccaagaagtcccagcccaagatccagcctccctctcctgcgggatcaggatctatgcaggggccccagactccccagtcaaccagcagttccatggcagaaggaggagacttaaagccaccaactccagcatccacaccacacagtcagatccccccattgccaggcatgagcaggagcaattcagttgggatccaggatgcctttaatgatggaagtgactccacattccagaagcggaattccatgactccaaaccctgggtatcagcccagtatgaatacctctgacatgatggggcgcatgtcctatgagccaaataaggatccttatggcagcatgaggaaagctccagggagtgatcccttcatgtcctcagggcagggccccaacggcgggatgggtgacccctacagtcgtgctgccggccctgggctaggaaatgtggcgatgggaccacgacagcactatccctatggaggtccttatgacagagtgaggacggagcctggaatagggcctgagggaaacatgagcactggggccccacagccgaatctcatgccttccaacccagactcggggatgtattctcctagccgctaccccccgcagcagcagcagcagcagcagcaacgacatgattcctatggcaatcagttctccacccaaggcaccccttctggcagccccttccccagccagcagactacaatgtatcaacagcaacagcagaattacaagcggccaatggatggcacatatggccctcctgccaagcggcacgaaggggagatgtacagcgtgccatacagcactgggcaggggcagcctcagcagcagcagttgcccccagcccagccccagcctgccagccagcaacaagctgcccagccttcccctcagcaagatgtatacaaccagtatggcaatgcctatcctgccactgccacagctgctactgagcgccgaccagcaggcggcccccagaaccaatttccattccagtttggccgagaccgtgtctctgcaccccctggcaccaatgcccagcaaaacatgccaccacaaatgatgggcggccccatacaggcatcagctgaggttgctcagcaaggcaccatgtggcaggggcgtaatgacatgacctataattatgccaacaggcagagcacgggctctgccccccagggccccgcctatcatggcgtgaaccgaacagatgaaatgctgcacacagatcagagggccaaccacgaaggctcgtggccttcccatggcacacgccagcccccatatggtccctctgcccctgtgccccccatgacaaggccccctccatctaactaccagcccccaccaagcatgcagaatcacattcctcaggtatccagccctgctcccctgccccggccaatggagaaccgcacctctcctagcaagtctccattcctgcactctgggatgaaaatgcagaaggcaggtcccccagtacctgcctcgcacatagcacctgcccctgtgcagccccccatgattcggcgggatatcaccttcccacctggctctgttgaagccacacagcctgtgttgaagcagaggaggcggctcacaatgaaagacattggaaccccggaggcatggcgggtaatgatgtccctcaagtctggtctcctggcagagagcacatgggcattagataccatcaacatcctgctgtatgatgacaacagcatcatgaccttcaacctcagtcagctcccagggttgctagagctccttgtagaatatttccgacgatgcctgattgagatctttggcattttaaaggagtatgaggtgggtgacccaggacagagaacgctactggatcctgggaggttcagcaaggtgtctagtccagctcccatggagggtggggaagaagaagaagaacttctaggtcctaaactagaagaggaagaagaagaggaagtagttgaaaatgatgaggagatagccttttcaggcaaggacaagccagcttcagagaatagtgaggagaagctgatcagtaagtttgacaagcttccagtaaagatcgtacagaagaatgatccatttgtggtggactgctcagataagcttgggcgtgtgcaggagtttgacagtggcctgctgcactggcggattgtgggggggacaccactgagcatatccagacccacttcgagagcaagacagagctgctgccttcccggcctcacgcaccctgcccaccagcccctcggaagcatgtgacaacagcagagggtacaccagggacaacagaccaggaggggcccccacctgatggacctccagaaaaacggatcacagccactatggatgacatgttgtctactcggtctagcaccttgaccgaggatggagctaagagttcagaggccatcaaggagagcagcaagtttccatttggcattagcccagcacagagccaccggaacatcaagatcctagaggacgaaccccacagtaaggatgagaccccactgtgtacccttctggactggcaggattctcttgccaagcgctgcgtctgtgtgtccaataccattcgaagcctgtcatttgtgccaggcaatgactttgagatgtccaaacacccagggctgctgctcatcctgggcaagctgatcctgctgcaccacaagcacccagaacggaagcaggcaccactaacttatgaaaaggaggaggaacaggaccaaggggtgagctgcaacaaagtggagtggtggtgggactgcttggagatgctccgggaaaacaccttggttacactcgccaacatctcggggcagttggacctatctccataccccgagagcatttgcctgcctgtcctggacggactcctacactgggcagtttgcccttcagctgaagcccaggaccccttttccaccctgggccccaatgccgtcctttccccgcagagactggtcttggaaaccctcagcaaactcagcatccaggacaacaatgtggacctgattctggccacaccccccttcagccgcctggagaagttgtatagcactatggtgcgcttcctcagtgaccgaaagaacccggtgtgccgggagatggctgtggtactgctggccaacctggctcagggggacagcctggcagctcgtgccattgcagtgcagaagggcagtatcggcaacctcctgggcttcctagaggacagccttgccgccacacagttccagcagagccaggccagcctcctccacatgcagaacccaccctttgagccaactagtgtggacatgatgcggcgggctgcccgcgcgctgcttgccttggccaaggtggacgagaaccactcagagtttactctgtacgaatcacggctgttggacatctcggtatcaccgttgatgaactcattggtttcacaagtcatttgtgatgtactgtttttgattggccagtcatgacagccgtgggacacctcccccccccgtgtgtgtgtgcgtgtgtggagaacttagaaactgactgttgccctttatttatgcaaaaccacctcagaatccagtttaccctgtgctgtccagcttctcccttgggaaaaagtctctcctgtttctctctcctccttccacctcccctccctccatcacctcacgcctttctgttccttgtcctcaccttactcccctcaggaccctaccccaccctctttgaaaagacaaagctctgcctacatagaagactttttttattttaaccaaagttactgttgtttacagtgagtttggggaaaaaaaataaaataaaaatggctttcccagtccttgcatcaacgggatgccacatttcataactgtttttaatggtaaaaaaaaaaaaaaaaaatacaaaaaaaaattctgaaggacaaaaaaggtgactgctgaactgtgtgtggtttattgttgtacattcacaatcttgcaggagccaagaagttcgcagttgtgaacagaccctgttcactggagaggcctgtgcagtagagtgtagaccctttcatgtactgtactgtacacctgatactgtaaacatactgtaataataatgtctcacatggaaacagaaaacgctgggtcagcagcaagctgtagtttttaaaaatgtttttagttaaacgttgaggagaaaaaaaaaaaaggcttttcccccaaagtatcatgtgtgaacctacaacaccctgacctctttctctcctccttgattgtatgaataaccctgagatcacctcttagaactggttttaacctttagctgcagcggctacgctgccacgtgtgtatatatatgacgttgtacattgcacatacccttggatccccacagtttggtcctcctcccagctacccctttatagtatgacgagttaacaagttggtgacctgcacaaagcgagacacagctatttaatctcttgccagatatcgcccctcttggtgcgatgctgtacaggtctctgtaaaaagtccttgctgtctcagcagccaatcaacttatagtttatttttttctgggtttttgttttgttttgttttctttctaatcgaggtgtgaaaaagttctaggttcagttgaagttctgatgaagaaacacaattgagattttttcagtgataaaatctgcatatttgtatttcaacaatgtagctaaaacttgatgtaaattcctcctttttttccttttttggcttaatgaatatcatttattcagtatgaaatctttatactatatgttccacgtgttaagaataaatgtacattaaatcttggtaagacttt

SEQ ID NO: 110 - DNA, 8585 bp, Homo sapiens
cagaaagcggagagtcacagcggggccaggccctggggagcggagcctccaccgcccccctcattcccaggcaagggcttggggggaatgagccgggagagccgggtcccgagcctacagagccgggagcagctgagccgccggcgcctcggccgccgccgccgcctcctcctcctccgccgccgccagcccggagcctgagccggcggggcgggggggagaggagcgagcgcagcgcagcagcggagccccgcgaggcccgcccgggcgggtggggagggcagcccgggggactgggccccggggcggggtgggagggggggagaagacgaagacagggccgggtctctccgcggacgagacagcggggatcatggccgcgcaggtcgcccccgccgccgccagcagcctgggcaacccgccgccgccgccgccctcggagctgaagaaagccgagcagcagcagcgggaggaggcggggggcgaggcggcggcggcggcagcggccgagcgcggggaaatgaaggcagccgccgggcaggaaagcgagggccccgccgtggggccgccgcagccgctgggaaaggagctgcaggacggggccgagagcaatgggggtggcggcggcggcggagccggcagcggcggcgggcccggcgcggagccggacctgaagaactcgaacgggaacgcgggccctaggcccgccctgaacaataacctcacggagccgcccggcggcggcggtggcggcagcagcgatggggtgggggcgcctcctcactcagccgcggccgccttgccgcccccagcctacggcttcgggcaaccctacggccggagcccgtctgccgtcgccgccgccgcggccgccgtcttccaccaacaacatggcggacaacaaagccctggcctggcagcgctgcagagcggcggcggcgggggcctggagccctacgcggggccccagcagaactctcacgaccacggcttccccaaccaccagtacaactcctactaccccaaccgcagcgcctaccccccgcccgccccggcctacgcgctgagctccccgagaggtggcactccgggctccggcgcggcggcggctgccggctccaagccgcctccctcctccagcgcctccgcctcctcgtcgtcttcgtccttcgctcagcagcgcttcggggccatggggggaggcggcccctccgcggccggcgggggaactccccagcccaccgccacccccaccctcaaccaactgctcacgtcgcccagctcggcccggggctaccagggctaccccgggggcgactacagtggcgggccccaggacgggggcgccggcaagggcccggcggacatggcctcgcagtgttggggggctgcggcggcggcagctgcggcggcggccgcctcgggaggggcccaacaaaggagccaccacgcgcccatgagccccgggagcagcggcggcggggggcagccgctcgcccggacccctcagccatccagtccaatggatcagatgggcaagatgagacctcagccatatggcgggactaacccatactcgcagcaacagggacctccgtcaggaccgcagcaaggacatgggtacccagggcagccatacgggtcccagaccccgcagcggtacccgatgaccatgcagggccgggcgcagagtgccatgggcggcctctcttatacacagcagattcctccttatggacaacaaggccccagcgggtatggtcaacagggccagactccatattacaaccagcaaagtcctcaccctcagcagcagcagccaccctactcccagcaaccaccgtcccagacccctcatgcccaaccttcgtatcagcagcagccacagtctcaaccaccacagctccagtcctctcagcctccatactcccagcagccatcccagcctccacatcagcagtccccggctccatacccctcccagcagtcgacgacacagcagcacccccagagccagcccccctactcacagccacaggctcagtctccttaccagcagcagcaacctcagcagccagcaccctcgacgctctcccagcaggctgcgtatcctcagccccagtctcagcagtcccagcaaactgcctattcccagcagcgcttccctccaccgcaggagctatctcaagattcatttgggtctcaggcatcctcagccccctcaatgacctccagtaagggagggcaagaagatatgaacctgagccttcagtcaagaccctccagcttgcctgatctatctggttcaatagatgacctccccatggggacagaaggagctctgagtcctggagtgagcacatcagggatttccagcagccaaggagagcagagtaatccagctcagtctcctttctctcctcatacctcccctcacctgcctggcatccgaggcccttccccgtcccctgttggctctcccgccagtgttgctcagtctcgctcaggaccactctcgcctgctgcagtgccaggcaaccagatgccacctcggccacccagtggccagtcggacagcatcatgcatccttccatgaaccaatcaagcattgcccaagatcgaggttatatgcagaggaacccccagatgccccagtacagttccccccagcccggctcagccttatctccgcgtcagccttccggaggacagatacacacaggcatgggctcctaccagcagaactccatggggagctatggtccccaggggggtcagtatggcccacaaggtggctaccccaggcagccaaactataatgccttgcccaatgccaactaccccagtgcaggcatggctggaggcataaaccccatgggtgccggaggtcaaatgcatggacagcctggcatcccaccttatggcacactccctccagggaggatgagtcacgcctccatgggcaaccggccttatggccctaacatggccaatatgccacctcaggttgggtcagggatgtgtcccccaccagggggcatgaaccggaaaacccaagaaactgctgtcgccatgcatgttgctgccaactctatccaaaacaggccgccaggctaccccaatatgaatcaagggggcatgatgggaactggacctccttatggacaagggattaatagtatggctggcatgatcaaccctcagggacccccatattccatgggtggaaccatggccaacaattctgcagggatggcagccagcccagagatgatgggccttggggatgtaaagttaactccagccaccaaaatgaacaacaaggcatatgggacacccaagacagaatccaaatccaagaaatccagttcttctactacaaccaatgagaagatcaccaagttgtatgagctgggtggtgagcctgagaggaagatgtgggtggaccgttatctggccttcactgaggagaaggccatgggcatgacaaatctgcctgctgtgggtaggaaacctctggacctctatcgcctctatgtgtctgtgaaggagattggtggattgactcaggtcaacaagaacaaaaaatggcgggaacttgcaaccaacctcaatgtgggcacatcaagcagtgctgccagctccttgaaaaagcagtatatccagtgtctctatgcctttgaatgcaagattgaacggggagaagaccctcccccagacatctttgcagctgctgattccaagaagtcccagcccaagatccagcctccctctcctgcgggatcaggatctatgcaggggccccagactccccagtcaaccagcagttccatggcagaaggaggagacttaaagccaccaactccagcatccacaccacacagtcagatccccccattgccaggcatgagcaggagcaattcagttgggatccaggatgcctttaatgatggaagtgactccacattccagaagcggaattccatgactccaaaccctgggtatcagcccagtatgaatacctctgacatgatggggcgcatgtcctatgagccaaataaggatccttatggcagcatgaggaaagctccagggagtgatcccttcatgtcctcagggcagggccccaacggcgggatgggtgacccctacagtcgtgctgccggccctgggctaggaaatgtggcgatgggaccacgacagcactatccctatggaggtccttatgacagagtgaggacggagcctggaatagggcctgagggaaacatgagcactggggccccacagccgaatctcatgccttccaacccagactcggggatgtattctcctagccgctaccccccgcagcagcagcagcagcagcagcaacgacatgattcctatggcaatcagttctccacccaaggcaccccttctggcagccccttccccagccagcagactacaatgtatcaacagcaacagcagaattacaagcggccaatggatggcacatatggccctcctgccaagcggcacgaaggggagatgtacagcgtgccatacagcactgggcaggggcagcctcagcagcagcagttgcccccagcccagccccagcctgccagccagcaacaagctgcccagccttcccctcagcaagatgtatacaaccagtatggcaatgcctatcctgccactgccacagctgctactgagcgccgaccagcaggcggcccccagaaccaatttccattccagtttggccgagaccgtgtctctgcaccccctggcaccaatgcccagcaaaacatgccaccacaaatgatgggcggccccatacaggcatcagctgaggttgctcagcaaggcaccatgtggcaggggcgtaatgacatgacctataattatgccaacaggcagagcacgggctctgccccccagggccccgcctatcatggcgtgaaccgaacagatgaaatgctgcacacagatcagagggccaaccacgaaggctcgtggccttcccatggcacacgccagcccccatatggtccctctgcccctgtgccccccatgacaaggccccctccatctaactaccagcccccaccaagcatgcagaatcacattcctcaggtatccagccctgctcccctgccccggccaatggagaaccgcacctctcctagcaagtctccattcctgcactctgggatgaaaatgcagaaggcaggtcccccagtacctgcctcgcacatagcacctgcccctgtgcagccccccatgattcggcgggatatcaccttcccacctggctctgttgaagccacacagcctgtgttgaagcagaggaggcggctcacaatgaaagacattggaaccccggaggcatggcgggtaatgatgtccctcaagtctggtctcctggcagagagcacatgggcattagataccatcaacatcctgctgtatgatgacaacagcatcatgaccttcaacctcagtcagctcccagggttgctagagctccttgtagaatatttccgacgatgcctgattgagatctttggcattttaaaggagtatgaggtgggtgacccaggacagagaacgctactggatcctgggaggttcagcaaggtgtctagtccagctcccatggagggtggggaagaagaagaagaacttctaggtcctaaactagaagaggaagaagaagaggaagtagttgaaaatgatgaggagatagccttttcaggcaaggacaagccagcttcagagaatagtgaggagaagctgatcagtaagtttgacaagcttccagtaaagatcgtacagaagaatgatccatttgtggtggactgctcagataagcttgggcgtgtgcaggagtttgacagtggcctgctgcactggcggattggtgggggggacaccactgagcatatccagacccacttcgagagcaagacagagctgctgccttcccggcctcacgcaccctgcccaccagcccctcggaagcatgtgacaacagcagagggtacaccagggacaacagaccaggaggggcccccacctgatggacctccagaaaaacggatcacagccactatggatgacatgttgtctactcggtctagcaccttgaccgaggatggagctaagagttcagaggccatcaaggagagcagcaagtttccatttggcattagcccagcacagagccaccggaacatcaagatcctagaggacgaaccccacagtaaggatgagaccccactgtgtacccttctggactggcaggattctcttgccaagcgctgcgtctgtgtgtccaataccattcgaagcctgtcatttgtgccaggcaatgactttgagatgtccaaacacccagggctgctgctcatcctgggcaagctgatcctgctgcaccacaagcacccagaacggaagcaggcaccactaacttatgaaaaggaggaggaacaggaccaaggggtgagctgcaacaaagtggagtggtggtgggactgcttggagatgctccgggaaaacaccttggttacactcgccaacatctcggggcagttggacctatctccataccccgagagcatttgcctgcctgtcctggacggactcctacactgggcagtttgcccttcagctgaagcccaggaccccttttccaccctgggccccaatgccgtcctttccccgcagagactggtcttggaaaccctcagcaaactcagcatccaggacaacaatgtggacctgattctggccacaccccccttcagccgcctggagaagttgtatagcactatggtgcgcttcctcagtgaccgaaagaacccggtgtgccgggagatggctgtggtactgctggccaacctggctcagggggacagcctggcagctcgtgccattgcagtgcagaagggcagtatcggcaacctcctgggcttcctagaggacagccttgccgccacacagttccagcagagccaggccagcctcctccacatgcagaacccaccctttgagccaactagtgtggacatgatgcggcgggctgcccgcgcgctgcttgccttggccaaggtggacgagaaccactcagagtttactctgtacgaatcacggctgttggacatctcggtatcaccgttgatgaactcattggtttcacaagtcatttgtgatgtactgtttttgattggccagtcatgacagccgtgggacacctcccccccccgtgtgtgtgtgcgtgtgtggagaacttagaaactgactgttgccctttatttatgcaaaaccacctcagaatccagtttaccctgtgctgtccagcttctcccttgggaaaaagtctctcctgtttctctctcctccttccacctcccctccctccatcacctcacgcctttctgttccttgtcctcaccttactcccctcaggaccctaccccaccctctttgaaaagacaaagctctgcctacatagaagactttttttattttaaccaaagttactgttgtttacagtgagtttggggaaaaaaaataaaataaaaatggctttcccagtccttgcatcaacgggatgccacatttcataactgtttttaatggtaaaaaaaaaaaaaaaaaatacaaaaaaaaattctgaaggacaaaaaaggtgactgctgaactgtgtgtggtttattgttgtacattcacaatcttgcaggagccaagaagttcgcagttgtgaacagaccctgttcactggagaggcctgtgcagtagagtgtagaccctttcatgtactgtactgtacacctgatactgtaaacatactgtaataataatgtctcacatggaaacagaaaacgctgggtcagcagcaagctgtagtttttaaaaatgtttttagttaaacgttgaggagaaaaaaaaaaaaggcttttcccccaaagtatcatgtgtgaacctacaacaccctgacctctttctctcctccttgattgtatgaataaccctgagatcacctcttagaactggttttaacctttagctgcagcggctacgctgccacgtgtgtatatatatgacgttgtacattgcacatacccttggatccccacagtttggtcctcctcccagctacccctttatagtatgacgagttaacaagttggtgacctgcacaaagcgagacacagctatttaatctcttgccagatatcgcccctcttggtgcgatgctgtacaggtctctgtaaaaagtccttgctgtctcagcagccaatcaacttatagtttatttttttctgggtttttgttttgttttgttttctttctaatcgaggtgtgaaaaagttctaggttcagttgaagttctgatgaagaaacacaattgagattttttcagtgataaaatctgcatatttgtatttcaacaatgtagctaaaacttgatgtaaattcctcctttttttccttttttggcttaatgaatatcatttattcagtatgaaatctttatactatatgttccacgtgttaagaataaatgtacattaaatcttggtaagacttt

SEQ ID NO: 111 - DNA, 8585 bp, Homo sapiens
cagaaagcggagagtcacagcggggccaggccctggggagcggagcctccaccgcccccctcattcccaggcaagggcttggggggaatgagccgggagagccgggtcccgagcctacagagccgggagcagctgagccgccggcgcctcggccgccgccgccgcctcctcctcctccgccgccgccagcccggagcctgagccggcggggcgggggggagaggagcgagcgcagcgcagcagcggagccccgcgaggcccgcccgggcgggtggggagggcagcccgggggactgggccccggggcggggtgggagggggggagaagacgaagacagggccgggtctctccgcggacgagacagcggggatcatggccgcgcaggtcgcccccgccgccgccagcagcctgggcaacccgccgccgccgccgccctcggagctgaagaaagccgagcagcagcagcgggaggaggcggggggcgaggcggcggcggcggcagcggccgagcgcggggaaatgaaggcagccgccgggcaggaaagcgagggccccgccgtggggccgccgcagccgctgggaaaggagctgcaggacggggccgagagcaatgggggtggcggcggcggcggagccggcagcggcggcgggcccggcgcggagccggacctgaagaactcgaacgggaacgcgggccctaggcccgccctgaacaataacctcacggagccgcccggcggcggcggtggcggcagcagcgatggggtgggggcgcctcctcactcagccgcggccgccttgccgcccccagcctacggcttcgggcaaccctacggccggagcccgtctgccgtcgccgccgccgcggccgccgtcttccaccaacaacatggcggacaacaaagccctggcctggcagcgctgcagagcggcggcggcgggggcctggagccctacgcggggccccagcagaactctcacgaccacggcttccccaaccaccagtacaactcctactaccccaaccgcagcgcctaccccccgcccgccccggcctacgcgctgagctccccgagaggtggcactccgggctccggcgcggcggcggctgccggctccaagccgcctccctcctccagcgcctccgcctcctcgtcgtcttcgtccttcgctcagcagcgcttcggggccatggggggaggcggcccctccgcggccggcgggggaactccccagcccaccgccacccccaccctcaaccaactgctcacgtcgcccagctcggcccggggctaccagggctaccccgggggcgactacagtggcgggccccaggacgggggcgccggcaagggcccggcggacatggcctcgcagtgttggggggctgcggcggcggcagctgcggcggcggccgcctcgggaggggcccaacaaaggagccaccacgcgcccatgagccccgggagcagcggcggcggggggcagccgctcgcccggacccctcagccatccagtccaatggatcagatgggcaagatgagacctcagccatatggcgggactaacccatactcgcagcaacagggacctccgtcaggaccgcagcaaggacatgggtacccagggcagccatacgggtcccagaccccgcagcggtacccgatgaccatgcagggccgggcgcagagtgccatgggcggcctctcttatacacagcagattcctccttatggacaacaaggccccagcgggtatggtcaacagggccagactccatattacaaccagcaaagtcctcaccctcagcagcagcagccaccctactcccagcaaccaccgtcccagacccctcatgcccaaccttcgtatcagcagcagccacagtctcaaccaccacagctccagtcctctcagcctccatactcccagcagccatcccagcctccacatcagcagtccccggctccatacccctcccagcagtcgacgacacagcagcacccccagagccagcccccctactcacagccacaggctcagtctccttaccagcagcagcaacctcagcagccagcaccctcgacgctctcccagcaggctgcgtatcctcagccccagtctcagcagtcccagcaaactgcctattcccagcagcgcttccctccaccgcaggagctatctcaagattcatttgggtctcaggcatcctcagccccctcaatgacctccagtaagggagggcaagaagatatgaacctgagccttcagtcaagaccctccagcttgcctgatctatctggttcaatagatgacctccccatggggacagaaggagctctgagtcctggagtgagcacatcagggatttccagcagccaaggagagcagagtaatccagctcagtctcctttctctcctcatacctcccctcacctgcctggcatccgaggcccttccccgtcccctgttggctctcccgccagtgttgctcagtctcgctcaggaccactctcgcctgctgcagtgccaggcaaccagatgccacctcggccacccagtggccagtcggacagcatcatgcatccttccatgaaccaatcaagcattgcccaagatcgaggttatatgcagaggaacccccagatgccccagtacagttccccccagcccggctcagccttatctccgcgtcagccttccggaggacagatacacacaggcatgggctcctaccagcagaactccatggggagctatggtccccaggggggtcagtatggcccacaaggtggctaccccaggcagccaaactataatgccttgcccaatgccaactaccccagtgcaggcatggctggaggcataaaccccatgggtgccggaggtcaaatgcatggacagcctggcatcccaccttatggcacactccctccagggaggatgagtcacgcctccatgggcaaccggccttatggccctaacatggccaatatgccacctcaggttgggtcagggatgtgtcccccaccagggggcatgaaccggaaaacccaagaaactgctgtcgccatgcatgttgctgccaactctatccaaaacaggccgccaggctaccccaatatgaatcaagggggcatgatgggaactggacctccttatggacaagggattaatagtatggctggcatgatcaaccctcagggacccccatattccatgggtggaaccatggccaacaattctgcagggatggcagccagcccagagatgatgggccttggggatgtaaagttaactccagccaccaaaatgaacaacaaggcagatgggacacacaagacagaatccaaatccaagaaatccagttcttctactacaaccaatgagaagatcaccaagttgtatgagctgggtggtgagcctgagaggaagatgtgggtggaccgttatctggccttcactgaggagaaggccatgggcatgacaaatctgcctgctgtgggtaggaaacctctggacctctatcgcctctatgtgtctgtgaaggagattggtggattgactcaggtcaacaagaacaaaaaatggcgggaacttgcaaccaacctcaatgtgggcacatcaagcagtgctgccagctccttgaaaaagcagtatatccagtgtctctatgcctttgaatgcaagattgaacggggagaagaccctcccccagacatctttgcagctgctgattccaagaagtcccagcccaagatccagcctccctctcctgcgggatcaggatctatgcaggggccccagactccccagtcaaccagcagttccatggcagaaggaggagacttaaagccaccaactccagcatccacaccacacagtcagatccccccattgccaggcatgagcaggagcaattcagttgggatccaggatgcctttaatgatggaagtgactccacattccagaagcggaattccatgactccaaaccctgggtatcagcccagtatgaatacctctgacatgatggggcgcatgtcctatgagccaaataaggatccttatggcagcatgaggaaagctccagggagtgatcccttcatgtcctcagggcagggccccaacggcgggatgggtgacccctacagtcgtgctgccggccctgggctaggaaatgtggcgatgggaccacgacagcactatccctatggaggtccttatgacagagtgaggacggagcctggaatagggcctgagggaaacatgagcactggggccccacagccgaatctcatgccttccaacccagactcggggatgtattctcctagccgctaccccccgcagcagcagcagcagcagcagcaacgacatgattcctatggcaatcagttctccacccaaggcaccccttctggcagccccttccccagccagcagactacaatgtatcaacagcaacagcagaattacaagcggccaatggatggcacatatggccctcctgccaagcggcacgaaggggagatgtacagcgtgccatacagcactgggcaggggcagcctcagcagcagcagttgcccccagcccagccccagcctgccagccagcaacaagctgcccagccttcccctcagcaagatgtatacaaccagtatggcaatgcctatcctgccactgccacagctgctactgagcgccgaccagcaggcggcccccagaaccaatttccattccagtttggccgagaccgtgtctctgcaccccctggcaccaatgcccagcaaaacatgccaccacaaatgatgggcggccccatacaggcatcagctgaggttgctcagcaaggcaccatgtggcaggggcgtaatgacatgacctataattatgccaacaggcagagcacgggctctgccccccagggccccgcctatcatggcgtgaaccgaacagatgaaatgctgcacacagatcagagggccaaccacgaaggctcgtggccttcccatggcacacgccagcccccatatggtccctctgcccctgtgccccccatgacaaggccccctccatctaactaccagcccccaccaagcatgcagaatcacattcctcaggtatccagccctgctcccctgccccggccaatggagaaccgcacctctcctagcaagtctccattcctgcactctgggatgaaaatgcagaaggcaggtcccccagtacctgcctcgcacatagcacctgcccctgtgcagccccccatgattcggcgggatatcaccttcccacctggctctgttgaagccacacagcctgtgttgaagcagaggaggcggctcacaatgaaagacattggaaccccggaggcatggcgggtaatgatgtccctcaagtctggtctcctggcagagagcacatgggcattagataccatcaacatcctgctgtatgatgacaacagcatcatgaccttcaacctcagtcagctcccagggttgctagagctccttgtagaatatttccgacgatgcctgattgagatctttggcattttaaaggagtatgaggtgggtgacccaggacagagaacgctactggatcctgggaggttcagcaaggtgtctagtccagctcccatggagggtggggaagaagaagaagaacttctaggtcctaaactagaagaggaagaagaagaggaagtagttgaaaatgatgaggagatagccttttcaggcaaggacaagccagcttcagagaatagtgaggagaagctgatcagtaagtttgacaagcttccagtaaagatcgtacagaagaatgatccatttgtggtggactgctcagataagcttgggcgtgtgcaggagtttgacagtggcctgctgcactggcggattggtgggggggacaccactgagcatatccagacccacttcgagagcaagacagagctgctgccttcccggcctcacgcaccctgcccaccagcccctcggaagcatgtgacaacagcagagggtacaccagggacaacagaccaggaggggcccccacctgatggacctccagaaaaacggatcacagccactatggatgacatgttgtctactcggtctagcaccttgaccgaggatggagctaagagttcagaggccatcaaggagagcagcaagtttccatttggcattagcccagcacagagccaccggaacatcaagatcctagaggacgaaccccacagtaaggatgagaccccactgtgtacccttctggactggcaggattctcttgccaagcgctgcgtctgtgtgtccaataccattcgaagcctgtcatttgtgccaggcaatgactttgagatgtccaaacacccagggctgctgctcatcctgggcaagctgatcctgctgcaccacaagcacccagaacggaagcaggcaccactaacttatgaaaaggaggaggaacaggaccaaggggtgagctgcaacaaagtggagtggtggtgggactgcttggagatgctccgggaaaacaccttggttacactcgccaacatctcggggcagttggacctatctccataccccgagagcatttgcctgcctgtcctggacggactcctacactgggcagtttgcccttcagctgaagcccaggaccccttttccaccctgggccccaatgccgtcctttccccgcagagactggtcttggaaaccctcagcaaactcagcatccaggacaacaatgtggacctgattctggccacaccccccttcagccgcctggagaagttgtatagcactatggtgcgcttcctcagtgaccgaaagaacccggtgtgccgggagatggctgtggtactgctggccaacctggctcagggggacagcctggcagctcgtgccattgcagtgcagaagggcagtatcggcaacctcctgggcttcctagaggacagccttgccgccacacagttccagcagagccaggccagcctcctccacatgcagaacccaccctttgagccaactagtgtggacatgatgcggcgggctgcccgcgcgctgcttgccttggccaaggtggacgagaaccactcagagtttactctgtacgaatcacggctgttggacatctcggtatcaccgttgatgaactcattggtttcacaagtcatttgtgatgtactgtttttgattggccagtcatgacagccgtgggacacctcccccccccgtgtgtgtgtgcgtgtgtggagaacttagaaactgactgttgccctttatttatgcaaaaccacctcagaatccagtttaccctgtgctgtccagcttctcccttgggaaaaagtctctcctgtttctctctcctccttccacctcccctccctccatcacctcacgcctttctgttccttgtcctcaccttactcccctcaggaccctaccccaccctctttgaaaagacaaagctctgcctacatagaagactttttttattttaaccaaagttactgttgtttacagtgagtttggggaaaaaaaataaaataaaaatggctttcccagtccttgcatcaacgggatgccacatttcataactgtttttaatggtaaaaaaaaaaaaaaaaaatacaaaaaaaaattctgaaggacaaaaaaggtgactgctgaactgtgtgtggtttattgttgtacattcacaatcttgcaggagccaagaagttcgcagttgtgaacagaccctgttcactggagaggcctgtgcagtagagtgtagaccctttcatgtactgtactgtacacctgatactgtaaacatactgtaataataatgtctcacatggaaacagaaaacgctgggtcagcagcaagctgtagtttttaaaaatgtttttagttaaacgttgaggagaaaaaaaaaaaaggcttttcccccaaagtatcatgtgtgaacctacaacaccctgacctctttctctcctccttgattgtatgaataaccctgagatcacctcttagaactggttttaacctttagctgcagcggctacgctgccacgtgtgtatatatatgacgttgtacattgcacatacccttggatccccacagtttggtcctcctcccagctacccctttatagtatgacgagttaacaagttggtgacctgcacaaagcgagacacagctatttaatctcttgccagatatcgcccctcttggtgcgatgctgtacaggtctctgtaaaaagtccttgctgtctcagcagccaatcaacttatagtttatttttttctgggtttttgttttgttttgttttctttctaatcgaggtgtgaaaaagttctaggttcagttgaagttctgatgaagaaacacaattgagattttttcagtgataaaatctgcatatttgtatttcaacaatgtagctaaaacttgatgtaaattcctcctttttttccttttttggcttaatgaatatcatttattcagtatgaaatctttatactatatgttccacgtgttaagaataaatgtacattaaatcttggtaagacttt

SEQ ID NO: 112 - DNA, 8585 bp, Homo sapiens
cagaaagcggagagtcacagcggggccaggccctggggagcggagcctccaccgcccccctcattcccaggcaagggcttggggggaatgagccgggagagccgggtcccgagcctacagagccgggagcagctgagccgccggcgcctcggccgccgccgccgcctcctcctcctccgccgccgccagcccggagcctgagccggcggggcgggggggagaggagcgagcgcagcgcagcagcggagccccgcgaggcccgcccgggcgggtggggagggcagcccgggggactgggccccggggcggggtgggagggggggagaagacgaagacagggccgggtctctccgcggacgagacagcggggatcatggccgcgcaggtcgcccccgccgccgccagcagcctgggcaacccgccgccgccgccgccctcggagctgaagaaagccgagcagcagcagcgggaggaggcggggggcgaggcggcggcggcggcagcggccgagcgcggggaaatgaaggcagccgccgggcaggaaagcgagggccccgccgtggggccgccgcagccgctgggaaaggagctgcaggacggggccgagagcaatgggggtggcggcggcggcggagccggcagcggcggcgggcccggcgcggagccggacctgaagaactcgaacgggaacgcgggccctaggcccgccctgaacaataacctcacggagccgcccggcggcggcggtggcggcagcagcgatggggtgggggcgcctcctcactcagccgcggccgccttgccgcccccagcctacggcttcgggcaaccctacggccggagcccgtctgccgtcgccgccgccgcggccgccgtcttccaccaacaacatggcggacaacaaagccctggcctggcagcgctgcagagcggcggcggcgggggcctggagccctacgcggggccccagcagaactctcacgaccacggcttccccaaccaccagtacaactcctactaccccaaccgcagcgcctaccccccgcccgccccggcctacgcgctgagctccccgagaggtggcactccgggctccggcgcggcggcggctgccggctccaagccgcctccctcctccagcgcctccgcctcctcgtcgtcttcgtccttcgctcagcagcgcttcggggccatggggggaggcggcccctccgcggccggcgggggaactccccagcccaccgccacccccaccctcaaccaactgctcacgtcgcccagctcggcccggggctaccagggctaccccgggggcgactacagtggcgggccccaggacgggggcgccggcaagggcccggcggacatggcctcgcagtgttggggggctgcggcggcggcagctgcggcggcggccgcctcgggaggggcccaacaaaggagccaccacgcgcccatgagccccgggagcagcggcggcggggggcagccgctcgcccggacccctcagccatccagtccaatggatcagatgggcaagatgagacctcagccatatggcgggactaacccatactcgcagcaacagggacctccgtcaggaccgcagcaaggacatgggtacccagggcagccatacgggtcccagaccccgcagcggtacccgatgaccatgcagggccgggcgcagagtgccatgggcggcctctcttatacacagcagattcctccttatggacaacaaggccccagcgggtatggtcaacagggccagactccatattacaaccagcaaagtcctcaccctcagcagcagcagccaccctactcccagcaaccaccgtcccagacccctcatgcccaaccttcgtatcagcagcagccacagtctcaaccaccacagctccagtcctctcagcctccatactcccagcagccatcccagcctccacatcagcagtccccggctccatacccctcccagcagtcgacgacacagcagcacccccagagccagcccccctactcacagccacaggctcagtctccttaccagcagcagcaacctcagcagccagcaccctcgacgctctcccagcaggctgcgtatcctcagccccagtctcagcagtcccagcaaactgcctattcccagcagcgcttccctccaccgcaggagctatctcaagattcatttgggtctcaggcatcctcagccccctcaatgacctccagtaagggagggcaagaagatatgaacctgagccttcagtcaagaccctccagcttgcctgatctatctggttcaatagatgacctccccatggggacagaaggagctctgagtcctggagtgagcacatcagggatttccagcagccaaggagagcagagtaatccagctcagtctcctttctctcctcatacctcccctcacctgcctggcatccgaggcccttccccgtcccctgttggctctcccgccagtgttgctcagtctcgctcaggaccactctcgcctgctgcagtgccaggcaaccagatgccacctcggccacccagtggccagtcggacagcatcatgcatccttccatgaaccaatcaagcattgcccaagatcgaggttatatgcagaggaacccccagatgccccagtacagttccccccagcccggctcagccttatctccgcgtcagccttccggaggacagatacacacaggcatgggctcctaccagcagaactccatggggagctatggtccccaggggggtcagtatggcccacaaggtggctaccccaggcagccaaactataatgccttgcccaatgccaactaccccagtgcaggcatggctggaggcataaaccccatgggtgccggaggtcaaatgcatggacagcctggcatcccaccttatggcacactccctccagggaggatgagtcacgcctccatgggcaaccggccttatggccctaacatggccaatatgccacctcaggttgggtcagggatgtgtcccccaccagggggcatgaaccggaaaacccaagaaactgctgtcgccatgcatgttgctgccaactctatccaaaacaggccgccaggctaccccaatatgaatcaagggggcatgatgggaactggacctccttatggacaagggattaatagtatggctggcatgatcaaccctcagggacccccatattccatgggtggaaccatggccaacaattctgcagggatggcagccagcccagagatgatgggccttggggatgtaaagttaactccagccaccaaaatgaacaacaaggcagatgggacacccaagacagaatccaaatccaagaaatccagttcttctactacaaccaatgagaagatcaccaagttgtatgagctgggtggtgagcctgagaggaagatgtgggtggaccgttatctggccttcactgaggagaaggccatgggcatgacaaatctgcctgctgtgggtaggaaacctctggacctctatcgcctctatgtgtctgtgaaggagattggtggattgactcaggtcaacaagaacaaaaaatggcgggaacttgcaaccaacctcaatgtgggcacatcaagcagtgctgccagctccttgaaaaagcagtatatccagtgtctctatgcctttgaatgcaagattgaacggggagaagaccctcccccagacatctttgcagctgctgattccaagaagtcccagcccaagatccagcctccctctcctgcgggatcaggatctatgcaggggccccagactccccagtcaaccagcagttccatggcagaaggaggagacttaaagccaccaactccagcatccacaccacacagtcagatccccccattgccaggcatgagcaggagcaattcagttgggatccaggatgcctttaatgatggaagtgactccacattccagaagcggaattccatgactccaaaccctgggtatcagcccagtatgaatacctctgacatgatggggcgcatgtcctatgagccaaataaggatccttatggcagcatgaggaaagctccagggagtgatcccttcatgtcctcagggcagggccccaacggcgggatgggtgacccctacagtcgtgctgccggccctgggctaggaaatgtggcgatgggaccacgacagcactatccctatggaggtccttatgacagagtgaggacggagcctggaatagggcctgagggaaacatgagcactggggccccacagccgaatctcatgccttccaacccagactcggggatgtattctcctagccgctaccccccgcagcagcagcagcagcagcagcaacgacatgattcctatggcaatcagttctccacccaaggcaccccttctggcagccccttccccagccagcagactacaatgtatcaacagcaacagcagaattacaagcggccaatggatggcacatatggccctcctgccaagcggcacgaaggggagatgtacagcgtgccatacagcactgggcaggggcagcctcagcagcagcagttgcccccagcccagccccagcctgccagccagcaacaagctgcccagccttcccctcagcaagatgtatacaaccagtatggcaatgcctatcctgccactgccacagctgctactgagcgccgaccagcaggcggcccccagaaccaatttccattccagtttggccgagaccgtgtctctgcaccccctggcaccaatgcccagcaaaacatgccaccacaaatgatgggcggccccatacaggcatcagctgaggttgctcagcaaggcaccatgtggcaggggcgtaatgacatgacctataattatgccaacaggcagagcacgggctctgccccccagggccccgcctatcatggcgtgaaccgaacagatgaaatgctgcacacagatcagagggccaaccacgaaggctcgtggcattcccatggcacacgccagcccccatatggtccctctgcccctgtgccccccatgacaaggccccctccatctaactaccagcccccaccaagcatgcagaatcacattcctcaggtatccagccctgctcccctgccccggccaatggagaaccgcacctctcctagcaagtctccattcctgcactctgggatgaaaatgcagaaggcaggtcccccagtacctgcctcgcacatagcacctgcccctgtgcagccccccatgattcggcgggatatcaccttcccacctggctctgttgaagccacacagcctgtgttgaagcagaggaggcggctcacaatgaaagacattggaaccccggaggcatggcgggtaatgatgtccctcaagtctggtctcctggcagagagcacatgggcattagataccatcaacatcctgctgtatgatgacaacagcatcatgaccttcaacctcagtcagctcccagggttgctagagctccttgtagaatatttccgacgatgcctgattgagatctttggcattttaaaggagtatgaggtgggtgacccaggacagagaacgctactggatcctgggaggttcagcaaggtgtctagtccagctcccatggagggtggggaagaagaagaagaacttctaggtcctaaactagaagaggaagaagaagaggaagtagttgaaaatgatgaggagatagccttttcaggcaaggacaagccagcttcagagaatagtgaggagaagctgatcagtaagtttgacaagcttccagtaaagatcgtacagaagaatgatccatttgtggtggactgctcagataagcttgggcgtgtgcaggagtttgacagtggcctgctgcactggcggattggtgggggggacaccactgagcatatccagacccacttcgagagcaagacagagctgctgccttcccggcctcacgcaccctgcccaccagcccctcggaagcatgtgacaacagcagagggtacaccagggacaacagaccaggaggggcccccacctgatggacctccagaaaaacggatcacagccactatggatgacatgttgtctactcggtctagcaccttgaccgaggatggagctaagagttcagaggccatcaaggagagcagcaagtttccatttggcattagcccagcacagagccaccggaacatcaagatcctagaggacgaaccccacagtaaggatgagaccccactgtgtacccttctggactggcaggattctcttgccaagcgctgcgtctgtgtgtccaataccattcgaagcctgtcatttgtgccaggcaatgactttgagatgtccaaacacccagggctgctgctcatcctgggcaagctgatcctgctgcaccacaagcacccagaacggaagcaggcaccactaacttatgaaaaggaggaggaacaggaccaaggggtgagctgcaacaaagtggagtggtggtgggactgcttggagatgctccgggaaaacaccttggttacactcgccaacatctcggggcagttggacctatctccataccccgagagcatttgcctgcctgtcctggacggactcctacactgggcagtttgcccttcagctgaagcccaggaccccttttccaccctgggccccaatgccgtcctttccccgcagagactggtcttggaaaccctcagcaaactcagcatccaggacaacaatgtggacctgattctggccacaccccccttcagccgcctggagaagttgtatagcactatggtgcgcttcctcagtgaccgaaagaacccggtgtgccgggagatggctgtggtactgctggccaacctggctcagggggacagcctggcagctcgtgccattgcagtgcagaagggcagtatcggcaacctcctgggcttcctagaggacagccttgccgccacacagttccagcagagccaggccagcctcctccacatgcagaacccaccctttgagccaactagtgtggacatgatgcggcgggctgcccgcgcgctgcttgccttggccaaggtggacgagaaccactcagagtttactctgtacgaatcacggctgttggacatctcggtatcaccgttgatgaactcattggtttcacaagtcatttgtgatgtactgtttttgattggccagtcatgacagccgtgggacacctcccccccccgtgtgtgtgtgcgtgtgtggagaacttagaaactgactgttgccctttatttatgcaaaaccacctcagaatccagtttaccctgtgctgtccagcttctcccttgggaaaaagtctctcctgtttctctctcctccttccacctcccctccctccatcacctcacgcctttctgttccttgtcctcaccttactcccctcaggaccctaccccaccctctttgaaaagacaaagctctgcctacatagaagactttttttattttaaccaaagttactgttgtttacagtgagtttggggaaaaaaaataaaataaaaatggctttcccagtccttgcatcaacgggatgccacatttcataactgtttttaatggtaaaaaaaaaaaaaaaaaatacaaaaaaaaattctgaaggacaaaaaaggtgactgctgaactgtgtgtggtttattgttgtacattcacaatcttgcaggagccaagaagttcgcagttgtgaacagaccctgttcactggagaggcctgtgcagtagagtgtagaccctttcatgtactgtactgtacacctgatactgtaaacatactgtaataataatgtctcacatggaaacagaaaacgctgggtcagcagcaagctgtagtttttaaaaatgtttttagttaaacgttgaggagaaaaaaaaaaaaggcttttcccccaaagtatcatgtgtgaacctacaacaccctgacctctttctctcctccttgattgtatgaataaccctgagatcacctcttagaactggttttaacctttagctgcagcggctacgctgccacgtgtgtatatatatgacgttgtacattgcacatacccttggatccccacagtttggtcctcctcccagctacccctttatagtatgacgagttaacaagttggtgacctgcacaaagcgagacacagctatttaatctcttgccagatatcgcccctcttggtgcgatgctgtacaggtctctgtaaaaagtccttgctgtctcagcagccaatcaacttatagtttatttttttctgggtttttgttttgttttgttttctttctaatcgaggtgtgaaaaagttctaggttcagttgaagttctgatgaagaaacacaattgagattttttcagtgataaaatctgcatatttgtatttcaacaatgtagctaaaacttgatgtaaattcctcctttttttccttttttggcttaatgaatatcatttattcagtatgaaatctttatactatatgttccacgtgttaagaataaatgtacattaaatcttggtaagacttt

SEQ ID NO: 113 - DNA, 8585 bp, Homo sapiens
cagaaagcggagagtcacagcggggccaggccctggggagcggagcctccaccgcccccctcattcccaggcaagggcttggggggaatgagccgggagagccgggtcccgagcctacagagccgggagcagctgagccgccggcgcctcggccgccgccgccgcctcctcctcctccgccgccgccagcccggagcctgagccggcggggcgggggggagaggagcgagcgcagcgcagcagcggagccccgcgaggcccgcccgggcgggtggggagggcagcccgggggactgggccccggggcggggtgggagggggggagaagacgaagacagggccgggtctctccgcggacgagacagcggggatcatggccgcgcaggtcgcccccgccgccgccagcagcctgggcaacccgccgccgccgccgccctcggagctgaagaaagccgagcagcagcagcgggaggaggcggggggcgaggcggcggcggcggcagcggccgagcgcggggaaatgaaggcagccgccgggcaggaaagcgagggccccgccgtggggccgccgcagccgctgggaaaggagctgcaggacggggccgagagcaatgggggtggcggcggcggcggagccggcagcggcggcgggcccggcgcggagccggacctgaagaactcgaacgggaacgcgggccctaggcccgccctgaacaataacctcacggagccgcccggcggcggcggtggcggcagcagcgatggggtgggggcgcctcctcactcagccgcggccgccttgccgcccccagcctacggcttcgggcaaccctacggccggagcccgtctgccgtcgccgccgccgcggccgccgtcttccaccaacaacatggcggacaacaaagccctggcctggcagcgctgcagagcggcggcggcgggggcctggagccctacgcggggccccagcagaactctcacgaccacggcttccccaaccaccagtacaactcctactaccccaaccgcagcgcctaccccccgcccgccccggcctacgcgctgagctccccgagaggtggcactccgggctccggcgcggcggcggctgccggctccaagccgcctccctcctccagcgcctccgcctcctcgtcgtcttcgtccttcgctcagcagcgcttcggggccatggggggaggcggcccctccgcggccggcgggggaactccccagcccaccgccacccccaccctcaaccaactgctcacgtcgcccagctcggcccggggctaccagggctaccccgggggcgactacagtggcgggccccaggacgggggcgccggcaagggcccggcggacatggcctcgcagtgttggggggctgcggcggcggcagctgcggcggcggccgcctcgggaggggcccaacaaaggagccaccacgcgcccatgagccccgggagcagcggcggcggggggcagccgctcgcccggacccctcagccatccagtccaatggatcagatgggcaagatgagacctcagccatatggcgggactaacccatactcgcagcaacagggacctccgtcaggaccgcagcaaggacatgggtacccagggcagccatacgggtcccagaccccgcagcggtacccgatgaccatgcagggccgggcgcagagtgccatgggcggcctctcttatacacagcagattcctccttatggacaacaaggccccagcgggtatggtcaacagggccagactccatattacaaccagcaaagtcctcaccctcagcagcagcagccaccctactcccagcaaccaccgtcccagacccctcatgcccaaccttcgtatcagcagcagccacagtctcaaccaccacagctccagtcctctcagcctccatactcccagcagccatcccagcctccacatcagcagtccccggctccatacccctcccagcagtcgacgacacagcagcacccccagagccagcccccctactcacagccacaggctcagtctccttaccagcagcagcaacctcagcagccagcaccctcgacgctctcccagcaggctgcgtatcctcagccccagtctcagcagtcccagcaaactgcctattcccagcagcgcttccctccaccgcaggagctatctcaagattcatttgggtctcaggcatcctcagccccctcaatgacctccagtaagggagggcaagaagatatgaacctgagccttcagtcaagaccctccagcttgcctgatctatctggttcaatagatgacctccccatggggacagaaggagctctgagtcctggagtgagcacatcagggatttccagcagccaaggagagcagagtaatccagctcagtctcctttctctcctcatacctcccctcacctgcctggcatccgaggcccttccccgtcccctgttggctctcccgccagtgttgctcagtctcgctcaggaccactctcgcctgctgcagtgccaggcaaccagatgccacctcggccacccagtggccagtcggacagcatcatgcatccttccatgaaccaatcaagcattgcccaagatcgaggttatatgcagaggaacccccagatgccccagtacagttccccccagcccggctcagccttatctccgcgtcagccttccggaggacagatacacacaggcatgggctcctaccagcagaactccatggggagctatggtccccaggggggtcagtatggcccacaaggtggctaccccaggcagccaaactataatgccttgcccaatgccaactaccccagtgcaggcatggctggaggcataaaccccatgggtgccggaggtcaaatgcatggacagcctggcatcccaccttatggcacactccctccagggaggatgagtcacgcctccatgggcaaccggccttatggccctaacatggccaatatgccacctcaggttgggtcagggatgtgtcccccaccagggggcatgaaccggaaaacccaagaaactgctgtcgccatgcatgttgctgccaactctatccaaaacaggccgccaggctaccccaatatgaatcaagggggcatgatgggaactggacctccttatggacaagggattaatagtatggctggcatgatcaaccctcagggacccccatattccatgggtggaaccatggccaacaattctgcagggatggcagccagcccagagatgatgggccttggggatgtaaagttaactccagccaccaaaatgaacaacaaggcagatgggacacccaagacagaatccaaatccaagaaatccagttcttctactacaaccaatgagaagatcaccaagttgtatgagctgggtggtgagcctgagaggaagatgtgggtggaccgttatctggccttcactgaggagaaggccatgggcatgacaaatctgcctgctgtgggtaggaaacctctggacctctatcgcctctatgtgtctgtgaaggagattggtggattgactcaggtcaacaagaacaaaaaatggcgggaacttgcaaccaacctcaatgtgggcacatcaagcagtgctgccagctccttgaaaaagcagtatatccagtgtctctatgcctttgaatgcaagattgaacggggagaagaccctcccccagacatctttgcagctgctgattccaagaagtcccagcccaagatccagcctccctctcctgcgggatcaggatctatgcaggggccccagactccccagtcaaccagcagttccatggcagaaggaggagacttaaagccaccaactccagcatccacaccacacagtcagatccccccattgccaggcatgagcaggagcaattcagttgggatccaggatgcctttaatgatggaagtgactccacattccagaagcggaattccatgactccaaaccctgggtatcagcccagtatgaatacctctgacatgatggggcgcatgtcctatgagccaaataaggatccttatggcagcatgaggaaagctccagggagtgatcccttcatgtcctcagggcagggccccaacggcgggatgggtgacccctacagtcgtgctgccggccctgggctaggaaatgtggcgatgggaccacgacagcactatccctatggaggtccttatgacagagtgaggacggagcctggaatagggcctgagggaaacatgagcactggggccccacagccgaatctcatgccttccaacccagactcggggatgtattctcctagccgctaccccccgcagcagcagcagcagcagcagcaacgacatgattcctatggcaatcagttctccacccaaggcaccccttctggcagccccttccccagccagcagactacaatgtatcaacagcaacagcagaattacaagcggccaatggatggcacatatggccctcctgccaagcggcacgaaggggagatgtacagcgtgccatacagcactgggcaggggcagcctcagcagcagcagttgcccccagcccagccccagcctgccagccagcaacaagctgcccagccttcccctcagcaagatgtatacaaccagtatggcaatgcctatcctgccactgccacagctgctactgagcgccgaccagcaggcggcccccagaaccaatttccattccagtttggccgagaccgtgtctctgcaccccctggcaccaatgcccagcaaaacatgccaccacaaatgatgggcggccccatacaggcatcagctgaggttgctcagcaaggcaccatgtggcaggggcgtaatgacatgacctataattatgccaacaggcagagcacgggctctgccccccagggccccgcctatcatggcgtgaaccgaacagatgaaatgctgcacacagatcagagggccaaccacgaaggctcgtggccttcccatggcacacgccagcccccatatggtccctctgcccctgtgccccccatgacaaggccccctccatctaactaccagcccccaccaagcatgcagaatcacattcctcaggtatccagccctgctcccctgccccggccaatggagaaccgcacctctcctagcaagtctccattcctgcactctgggatgaaaatgcagaaggcaggtcccccagtacctgcctcgcacatagcacctgcccctgtgcagccccccatgattcggcgggatatcaccttcccacctggctctgttgaagccacacagcctgtgttgaagcagaggaggcggctcacaatgaaagacattggaaccccggaggcatggcgggtaatgatgtccctcaagtctggtctcctggcagagagcacatgggcattagataccatcaacatcctgctgtatgatgacaacagcatcatgaccttcaacctcagtcagctcccatggttgctagagctccttgtagaatatttccgacgatgcctgattgagatctttggcattttaaaggagtatgaggtgggtgacccaggacagagaacgctactggatcctgggaggttcagcaaggtgtctagtccagctcccatggagggtggggaagaagaagaagaacttctaggtcctaaactagaagaggaagaagaagaggaagtagttgaaaatgatgaggagatagccttttcaggcaaggacaagccagcttcagagaatagtgaggagaagctgatcagtaagtttgacaagcttccagtaaagatcgtacagaagaatgatccatttgtggtggactgctcagataagcttgggcgtgtgcaggagtttgacagtggcctgctgcactggcggattggtgggggggacaccactgagcatatccagacccacttcgagagcaagacagagctgctgccttcccggcctcacgcaccctgcccaccagcccctcggaagcatgtgacaacagcagagggtacaccagggacaacagaccaggaggggcccccacctgatggacctccagaaaaacggatcacagccactatggatgacatgttgtctactcggtctagcaccttgaccgaggatggagctaagagttcagaggccatcaaggagagcagcaagtttccatttggcattagcccagcacagagccaccggaacatcaagatcctagaggacgaaccccacagtaaggatgagaccccactgtgtacccttctggactggcaggattctcttgccaagcgctgcgtctgtgtgtccaataccattcgaagcctgtcatttgtgccaggcaatgactttgagatgtccaaacacccagggctgctgctcatcctgggcaagctgatcctgctgcaccacaagcacccagaacggaagcaggcaccactaacttatgaaaaggaggaggaacaggaccaaggggtgagctgcaacaaagtggagtggtggtgggactgcttggagatgctccgggaaaacaccttggttacactcgccaacatctcggggcagttggacctatctccataccccgagagcatttgcctgcctgtcctggacggactcctacactgggcagtttgcccttcagctgaagcccaggaccccttttccaccctgggccccaatgccgtcctttccccgcagagactggtcttggaaaccctcagcaaactcagcatccaggacaacaatgtggacctgattctggccacaccccccttcagccgcctggagaagttgtatagcactatggtgcgcttcctcagtgaccgaaagaacccggtgtgccgggagatggctgtggtactgctggccaacctggctcagggggacagcctggcagctcgtgccattgcagtgcagaagggcagtatcggcaacctcctgggcttcctagaggacagccttgccgccacacagttccagcagagccaggccagcctcctccacatgcagaacccaccctttgagccaactagtgtggacatgatgcggcgggctgcccgcgcgctgcttgccttggccaaggtggacgagaaccactcagagtttactctgtacgaatcacggctgttggacatctcggtatcaccgttgatgaactcattggtttcacaagtcatttgtgatgtactgtttttgattggccagtcatgacagccgtgggacacctcccccccccgtgtgtgtgtgcgtgtgtggagaacttagaaactgactgttgccctttatttatgcaaaaccacctcagaatccagtttaccctgtgctgtccagcttctcccttgggaaaaagtctctcctgtttctctctcctccttccacctcccctccctccatcacctcacgcctttctgttccttgtcctcaccttactcccctcaggaccctaccccaccctctttgaaaagacaaagctctgcctacatagaagactttttttattttaaccaaagttactgttgtttacagtgagtttggggaaaaaaaataaaataaaaatggctttcccagtccttgcatcaacgggatgccacatttcataactgtttttaatggtaaaaaaaaaaaaaaaaaatacaaaaaaaaattctgaaggacaaaaaaggtgactgctgaactgtgtgtggtttattgttgtacattcacaatcttgcaggagccaagaagttcgcagttgtgaacagaccctgttcactggagaggcctgtgcagtagagtgtagaccctttcatgtactgtactgtacacctgatactgtaaacatactgtaataataatgtctcacatggaaacagaaaacgctgggtcagcagcaagctgtagtttttaaaaatgtttttagttaaacgttgaggagaaaaaaaaaaaaggcttttcccccaaagtatcatgtgtgaacctacaacaccctgacctctttctctcctccttgattgtatgaataaccctgagatcacctcttagaactggttttaacctttagctgcagcggctacgctgccacgtgtgtatatatatgacgttgtacattgcacatacccttggatccccacagtttggtcctcctcccagctacccctttatagtatgacgagttaacaagttggtgacctgcacaaagcgagacacagctatttaatctcttgccagatatcgcccctcttggtgcgatgctgtacaggtctctgtaaaaagtccttgctgtctcagcagccaatcaacttatagtttatttttttctgggtttttgttttgttttgttttctttctaatcgaggtgtgaaaaagttctaggttcagttgaagttctgatgaagaaacacaattgagattttttcagtgataaaatctgcatatttgtatttcaacaatgtagctaaaacttgatgtaaattcctcctttttttccttttttggcttaatgaatatcatttattcagtatgaaatctttatactatatgttccacgtgttaagaataaatgtacattaaatcttggtaagacttt

SEQ ID NO: 114 - DNA, 8585 bp, Homo sapiens
cagaaagcggagagtcacagcggggccaggccctggggagcggagcctccaccgcccccctcattcccaggcaagggcttggggggaatgagccgggagagccgggtcccgagcctacagagccgggagcagctgagccgccggcgcctcggccgccgccgccgcctcctcctcctccgccgccgccagcccggagcctgagccggcggggcgggggggagaggagcgagcgcagcgcagcagcggagccccgcgaggcccgcccgggcgggtggggagggcagcccgggggactgggccccggggcggggtgggagggggggagaagacgaagacagggccgggtctctccgcggacgagacagcggggatcatggccgcgcaggtcgcccccgccgccgccagcagcctgggcaacccgccgccgccgccgccctcggagctgaagaaagccgagcagcagcagcgggaggaggcggggggcgaggcggcggcggcggcagcggccgagcgcggggaaatgaaggcagccgccgggcaggaaagcgagggccccgccgtggggccgccgcagccgctgggaaaggagctgcaggacggggccgagagcaatgggggtggcggcggcggcggagccggcagcggcggcgggcccggcgcggagccggacctgaagaactcgaacgggaacgcgggccctaggcccgccctgaacaataacctcacggagccgcccggcggcggcggtggcggcagcagcgatggggtgggggcgcctcctcactcagccgcggccgccttgccgcccccagcctacggcttcgggcaaccctacggccggagcccgtctgccgtcgccgccgccgcggccgccgtcttccaccaacaacatggcggacaacaaagccctggcctggcagcgctgcagagcggcggcggcgggggcctggagccctacgcggggccccagcagaactctcacgaccacggcttccccaaccaccagtacaactcctactaccccaaccgcagcgcctaccccccgcccgccccggcctacgcgctgagctccccgagaggtggcactccgggctccggcgcggcggcggctgccggctccaagccgcctccctcctccagcgcctccgcctcctcgtcgtcttcgtccttcgctcagcagcgcttcggggccatggggggaggcggcccctccgcggccggcgggggaactccccagcccaccgccacccccaccctcaaccaactgctcacgtcgcccagctcggcccggggctaccagggctaccccgggggcgactacagtggcgggccccaggacgggggcgccggcaagggcccggcggacatggcctcgcagtgttggggggctgcggcggcggcagctgcggcggcggccgcctcgggaggggcccaacaaaggagccaccacgcgcccatgagccccgggagcagcggcggcggggggcagccgctcgcccggacccctcagccatccagtccaatggatcagatgggcaagatgagacctcagccatatggcgggactaacccatactcgcagcaacagggacctccgtcaggaccgcagcaaggacatgggtacccagggcagccatacgggtcccagaccccgcagcggtacccgatgaccatgcagggccgggcgcagagtgccatgggcggcctctcttatacacagcagattcctccttatggacaacaaggccccagcgggtatggtcaacagggccagactccatattacaaccagcaaagtcctcaccctcagcagcagcagccaccctactcccagcaaccaccgtcccagacccctcatgcccaaccttcgtatcagcagcagccacagtctcaaccaccacagctccagtcctctcagcctccatactcccagcagccatcccagcctccacatcagcagtccccggctccatacccctcccagcagtcgacgacacagcagcacccccagagccagcccccctactcacagccacaggctcagtctccttaccagcagcagcaacctcagcagccagcaccctcgacgctctcccagcaggctgcgtatcctcagccccagtctcagcagtcccagcaaactgcctattcccagcagcgcttccctccaccgcaggagctatctcaagattcatttgggtctcaggcatcctcagccccctcaatgacctccagtaagggagggcaagaagatatgaacctgagccttcagtcaagaccctccagcttgcctgatctatctggttcaatagatgacctccccatggggacagaaggagctctgagtcctggagtgagcacatcagggatttccagcagccaaggagagcagagtaatccagctcagtctcctttctctcctcatacctcccctcacctgcctggcatccgaggcccttccccgtcccctgttggctctcccgccagtgttgctcagtctcgctcaggaccactctcgcctgctgcagtgccaggcaaccagatgccacctcggccacccagtggccagtcggacagcatcatgcatccttccatgaaccaatcaagcattgcccaagatcgaggttatatgcagaggaacccccagatgccccagtacagttccccccagcccggctcagccttatctccgcgtcagccttccggaggacagatacacacaggcatgggctcctaccagcagaactccatggggagctatggtccccaggggggtcagtatggcccacaaggtggctaccccaggcagccaaactataatgccttgcccaatgccaactaccccagtgcaggcatggctggaggcataaaccccatgggtgccggaggtcaaatgcatggacagcctggcatcccaccttatggcacactccctccagggaggatgagtcacgcctccatgggcaaccggccttatggccctaacatggccaatatgccacctcaggttgggtcagggatgtgtcccccaccagggggcatgaaccggaaaacccaagaaactgctgtcgccatgcatgttgctgccaactctatccaaaacaggccgccaggctaccccaatatgaatcaagggggcatgatgggaactggacctccttatggacaagggattaatagtatggctggcatgatcaaccctcagggacccccatattccatgggtggaaccatggccaacaattctgcagggatggcagccagcccagagatgatgggccttggggatgtaaagttaactccagccaccaaaatgaacaacaaggcagatgggacacccaagacagaatccaaatccaagaaatccagttcttctactacaaccaatgagaagatcaccaagttgtatgagctgggtggtgagcctgagaggaagatgtgggtggaccgttatctggccttcactgaggagaaggccatgggcatgacaaatctgcctgctgtgggtaggaaacctctggacctctatcgcctctatgtgtctgtgaaggagattggtggattgactcaggtcaacaagaacaaaaaatggcgggaacttgcaaccaacctcaatgtgggcacatcaagcagtgctgccagctccttgaaaaagcagtatatccagtgtctctatgcctttgaatgcaagattgaacggggagaagaccctcccccagacatctttgcagctgctgattccaagaagtcccagcccaagatccagcctccctctcctgcgggatcaggatctatgcaggggccccagactccccagtcaaccagcagttccatggcagaaggaggagacttaaagccaccaactccagcatccacaccacacagtcagatccccccattgccaggcatgagcaggagcaattcagttgggatccaggatgcctttaatgatggaagtgactccacattccagaagcggaattccatgactccaaaccctgggtatcagcccagtatgaatacctctgacatgatggggcgcatgtcctatgagccaaataaggatccttatggcagcatgaggaaagctccagggagtgatcccttcatgtcctcagggcagggccccaacggcgggatgggtgacccctacagtcgtgctgccggccctgggctaggaaatgtggcgatgggaccacgacagcactatccctatggaggtccttatgacagagtgaggacggagcctggaatagggcctgagggaaacatgagcactggggccccacagccgaatctcatgccttccaacccagactcggggatgtattctcctagccgctaccccccgcagcagcagcagcagcagcagcaacgacatgattcctatggcaatcagttctccacccaaggcaccccttctggcagccccttccccagccagcagactacaatgtatcaacagcaacagcagaattacaagcggccaatggatggcacatatggccctcctgccaagcggcacgaaggggagatgtacagcgtgccatacagcactgggcaggggcagcctcagcagcagcagttgcccccagcccagccccagcctgccagccagcaacaagctgcccagccttcccctcagcaagatgtatacaaccagtatggcaatgcctatcctgccactgccacagctgctactgagcgccgaccagcaggcggcccccagaaccaatttccattccagtttggccgagaccgtgtctctgcaccccctggcaccaatgcccagcaaaacatgccaccacaaatgatgggcggccccatacaggcatcagctgaggttgctcagcaaggcaccatgtggcaggggcgtaatgacatgacctataattatgccaacaggcagagcacgggctctgccccccagggccccgcctatcatggcgtgaaccgaacagatgaaatgctgcacacagatcagagggccaaccacgaaggctcgtggccttcccatggcacacgccagcccccatatggtccctctgcccctgtgccccccatgacaaggccccctccatctaactaccagcccccaccaagcatgcagaatcacattcctcaggtatccagccctgctcccctgccccggccaatggagaaccgcacctctcctagcaagtctccattcctgcactctgggatgaaaatgcagaaggcaggtcccccagtacctgcctcgcacatagcacctgcccctgtgcagccccccatgattcggcgggatatcaccttcccacctggctctgttgaagccacacagcctgtgttgaagcagaggaggcggctcacaatgaaagacattggaaccccggaggcatggcgggtaatgatgtccctcaagtctggtctcctggcagagagcacatgggcattagataccatcaacatcctgctgtatgatgacaacagcatcatgaccttcaacctcagtcagctcccagggttgctagagctccttgtagaatatttccgacgatgcctgattgagatctttggcattttaaaggagtatgaggtgggtgacccaggacagagaacgctactggatcctgggaggttcagcaaggtgtctagtccagctcccatggagggtggggaagaagaagaagaacttctaggtcctaaactagaagaggaagaagaagaggaagtagttgaaaatgatgaggagatagccttttcaggcaaggacaagccagcttcagagaatagtgaggagaagctgatcagtaagtttgacaagcttccagtaaagatcgtacagaagaatgatccatttgtggtggactgctcagataagcttgggcgtgtgcaggagtttgacagtggcctgctgcactggcggattggtgggggggacaccactgagcatatccagacccacttcgagagcaagacagagctgctgccttcccggcctcacgcaccctgcccaccagcccctcggaagcatgtgacaacagcagagggtacaccagggacaacagaccaggaggggcccccacctgatggacctccagaaaaacggatcacagccactatggatgacatgttgtctactcggtctagcaccttgaccgaggatgtagctaagagttcagaggccatcaaggagagcagcaagtttccatttggcattagcccagcacagagccaccggaacatcaagatcctagaggacgaaccccacagtaaggatgagaccccactgtgtacccttctggactggcaggattctcttgccaagcgctgcgtctgtgtgtccaataccattcgaagcctgtcatttgtgccaggcaatgactttgagatgtccaaacacccagggctgctgctcatcctgggcaagctgatcctgctgcaccacaagcacccagaacggaagcaggcaccactaacttatgaaaaggaggaggaacaggaccaaggggtgagctgcaacaaagtggagtggtggtgggactgcttggagatgctccgggaaaacaccttggttacactcgccaacatctcggggcagttggacctatctccataccccgagagcatttgcctgcctgtcctggacggactcctacactgggcagtttgcccttcagctgaagcccaggaccccttttccaccctgggccccaatgccgtcctttccccgcagagactggtcttggaaaccctcagcaaactcagcatccaggacaacaatgtggacctgattctggccacaccccccttcagccgcctggagaagttgtatagcactatggtgcgcttcctcagtgaccgaaagaacccggtgtgccgggagatggctgtggtactgctggccaacctggctcagggggacagcctggcagctcgtgccattgcagtgcagaagggcagtatcggcaacctcctgggcttcctagaggacagccttgccgccacacagttccagcagagccaggccagcctcctccacatgcagaacccaccctttgagccaactagtgtggacatgatgcggcgggctgcccgcgcgctgcttgccttggccaaggtggacgagaaccactcagagtttactctgtacgaatcacggctgttggacatctcggtatcaccgttgatgaactcattggtttcacaagtcatttgtgatgtactgtttttgattggccagtcatgacagccgtgggacacctcccccccccgtgtgtgtgtgcgtgtgtggagaacttagaaactgactgttgccctttatttatgcaaaaccacctcagaatccagtttaccctgtgctgtccagcttctcccttgggaaaaagtctctcctgtttctctctcctccttccacctcccctccctccatcacctcacgcctttctgttccttgtcctcaccttactcccctcaggaccctaccccaccctctttgaaaagacaaagctctgcctacatagaagactttttttattttaaccaaagttactgttgtttacagtgagtttggggaaaaaaaataaaataaaaatggctttcccagtccttgcatcaacgggatgccacatttcataactgtttttaatggtaaaaaaaaaaaaaaaaaatacaaaaaaaaattctgaaggacaaaaaaggtgactgctgaactgtgtgtggtttattgttgtacattcacaatcttgcaggagccaagaagttcgcagttgtgaacagaccctgttcactggagaggcctgtgcagtagagtgtagaccctttcatgtactgtactgtacacctgatactgtaaacatactgtaataataatgtctcacatggaaacagaaaacgctgggtcagcagcaagctgtagtttttaaaaatgtttttagttaaacgttgaggagaaaaaaaaaaaaggcttttcccccaaagtatcatgtgtgaacctacaacaccctgacctctttctctcctccttgattgtatgaataaccctgagatcacctcttagaactggttttaacctttagctgcagcggctacgctgccacgtgtgtatatatatgacgttgtacattgcacatacccttggatccccacagtttggtcctcctcccagctacccctttatagtatgacgagttaacaagttggtgacctgcacaaagcgagacacagctatttaatctcttgccagatatcgcccctcttggtgcgatgctgtacaggtctctgtaaaaagtccttgctgtctcagcagccaatcaacttatagtttatttttttctgggtttttgttttgttttgttttctttctaatcgaggtgtgaaaaagttctaggttcagttgaagttctgatgaagaaacacaattgagattttttcagtgataaaatctgcatatttgtatttcaacaatgtagctaaaacttgatgtaaattcctcctttttttccttttttggcttaatgaatatcatttattcagtatgaaatctttatactatatgttccacgtgttaagaataaatgtacattaaatcttggtaagacttt

SEQ ID NO: 115 - DNA, 8585 bp, Homo sapiens
cagaaagcggagagtcacagcggggccaggccctggggagcggagcctccaccgcccccctcattcccaggcaagggcttggggggaatgagccgggagagccgggtcccgagcctacagagccgggagcagctgagccgccggcgcctcggccgccgccgccgcctcctcctcctccgccgccgccagcccggagcctgagccggcggggcgggggggagaggagcgagcgcagcgcagcagcggagccccgcgaggcccgcccgggcgggtggggagggcagcccgggggactgggccccggggcggggtgggagggggggagaagacgaagacagggccgggtctctccgcggacgagacagcggggatcatggccgcgcaggtcgcccccgccgccgccagcagcctgggcaacccgccgccgccgccgccctcggagctgaagaaagccgagcagcagcagcgggaggaggcggggggcgaggcggcggcggcggcagcggccgagcgcggggaaatgaaggcagccgccgggcaggaaagcgagggccccgccgtggggccgccgcagccgctgggaaaggagctgcaggacggggccgagagcaatgggggtggcggcggcggcggagccggcagcggcggcgggcccggcgcggagccggacctgaagaactcgaacgggaacgcgggccctaggcccgccctgaacaataacctcacggagccgcccggcggcggcggtggcggcagcagcgatggggtgggggcgcctcctcactcagccgcggccgccttgccgcccccagcctacggcttcgggcaaccctacggccggagcccgtctgccgtcgccgccgccgcggccgccgtcttccaccaacaacatggcggacaacaaagccctggcctggcagcgctgcagagcggcggcggcgggggcctggagccctacgcggggccccagcagaactctcacgaccacggcttccccaaccaccagtacaactcctactaccccaaccgcagcgcctaccccccgcccgccccggcctacgcgctgagctccccgagaggtggcactccgggctccggcgcggcggcggctgccggctccaagccgcctccctcctccagcgcctccgcctcctcgtcgtcttcgtccttcgctcagcagcgcttcggggccatggggggaggcggcccctccgcggccggcgggggaactccccagcccaccgccacccccaccctcaaccaactgctcacgtcgcccagctcggcccggggctaccagggctaccccgggggcgactacagtggcgggccccaggacgggggcgccggcaagggcccggcggacatggcctcgcagtgttggggggctgcggcggcggcagctgcggcggcggccgcctcgggaggggcccaacaaaggagccaccacgcgcccatgagccccgggagcagcggcggcggggggcagccgctcgcccggacccctcagccatccagtccaatggatcagatgggcaagatgagacctcagccatatggcgggactaacccatactcgcagcaacagggacctccgtcaggaccgcagcaaggacatgggtacccagggcagccatacgggtcccagaccccgcagcggtacccgatgaccatgcagggccgggcgcagagtgccatgggcggcctctcttatacacagcagattcctccttatggacaacaaggccccagcgggtatggtcaacagggccagactccatattacaaccagcaaagtcctcaccctcagcagcagcagccaccctactcccagcaaccaccgtcccagacccctcatgcccaaccttcgtatcagcagcagccacagtctcaaccaccacagctccagtcctctcagcctccatactcccagcagccatcccagcctccacatcagcagtccccggctccatacccctcccagcagtcgacgacacagcagcacccccagagccagcccccctactcacagccacaggctcagtctccttaccagcagcagcaacctcagcagccagcaccctcgacgctctcccagcaggctgcgtatcctcagccccagtctcagcagtcccagcaaactgcctattcccagcagcgcttccctccaccgcaggagctatctcaagattcatttgggtctcaggcatcctcagccccctcaatgacctccagtaagggagggcaagaagatatgaacctgagccttcagtcaagaccctccagcttgcctgatctatctggttcaatagatgacctccccatggggacagaaggagctctgagtcctggagtgagcacatcagggatttccagcagccaaggagagcagagtaatccagctcagtctcctttctctcctcatacctcccctcacctgcctggcatccgaggcccttccccgtcccctgttggctctcccgccagtgttgctcagtctcgctcaggaccactctcgcctgctgcagtgccaggcaaccagatgccacctcggccacccagtggccagtcggacagcatcatgcatccttccatgaaccaatcaagcattgcccaagatcgaggttatatgcagaggaacccccagatgccccagtacagttccccccagcccggctcagccttatctccgcgtcagccttccggaggacagatacacacaggcatgggctcctaccagcagaactccatggggagctatggtccccaggggggtcagtatggcccacaaggtggctaccccaggcagccaaactataatgccttgcccaatgccaactaccccagtgcaggcatggctggaggcataaaccccatgggtgccggaggtcaaatgcatggacagcctggcatcccaccttatggcacactccctccagggaggatgagtcacgcctccatgggcaaccggccttatggccctaacatggccaatatgccacctcaggttgggtcagggatgtgtcccccaccagggggcatgaaccggaaaacccaagaaactgctgtcgccatgcatgttgctgccaactctatccaaaacaggccgccaggctaccccaatatgaatcaagggggcatgatgggaactggacctccttatggacaagggattaatagtatggctggcatgatcaaccctcagggacccccatattccatgggtggaaccatggccaacaattctgcagggatggcagccagcccagagatgatgggccttggggatgtaaagttaactccagccaccaaaatgaacaacaaggcagatgggacacccaagacagaatccaaatccaagaaatccagttcttctactacaaccaatgagaagatcaccaagttgtatgagctgggtggtgagcctgagaggaagatgtgggtggaccgttatctggccttcactgaggagaaggccatgggcatgacaaatctgcctgctgtgggtaggaaacctctggacctctatcgcctctatgtgtctgtgaaggagattggtggattgactcaggtcaacaagaacaaaaaatggcgggaacttgcaaccaacctcaatgtgggcacatcaagcagtgctgccagctccttgaaaaagcagtatatccagtgtctctatgcctttgaatgcaagattgaacggggagaagaccctcccccagacatctttgcagctgctgattccaagaagtcccagcccaagatccagcctccctctcctgcgggatcaggatctatgcaggggccccagactccccagtcaaccagcagttccatggcagaaggaggagacttaaagccaccaactccagcatccacaccacacagtcagatccccccattgccaggcatgagcaggagcaattcagttgggatccaggatgcctttaatgatggaagtgactccacattccagaagcggaattccatgactccaaaccctgggtatcagcccagtatgaatacctctgacatgatggggcgcatgtcctatgagccaaataaggatccttatggcagcatgaggaaagctccagggagtgatcccttcatgtcctcagggcagggccccaacggcgggatgggtgacccctacagtcgtgctgccggccctgggctaggaaatgtggcgatgggaccacgacagcactatccctatggaggtccttatgacagagtgaggacggagcctggaatagggcctgagggaaacatgagcactggggccccacagccgaatctcatgccttccaacccagactcggggatgtattctcctagccgctaccccccgcagcagcagcagcagcagcagcaacgacatgattcctatggcaatcagttctccacccaaggcaccccttctggcagccccttccccagccagcagactacaatgtatcaacagcaacagcagaattacaagcggccaatggatggcacatatggccctcctgccaagcggcacgaaggggagatgtacagcgtgccatacagcactgggcaggggcagcctcagcagcagcagttgcccccagcccagccccagcctgccagccagcaacaagctgcccagccttcccctcagcaagatgtatacaaccagtatggcaatgcctatcctgccactgccacagctgctactgagcgccgaccagcaggcggcccccagaaccaatttccattccagtttggccgagaccgtgtctctgcaccccctggcaccaatgcccagcaaaacatgccaccacaaatgatgggcggccccatacaggcatcagctgaggttgctcagcaaggcaccatgtggcaggggcgtaatgacatgacctataattatgccaacaggcagagcacgggctctgccccccagggccccgcctatcatggcgtgaaccgaacagatgaaatgctgcacacagatcagagggccaaccacgaaggctcgtggccttcccatggcacacgccagcccccatatggtccctctgcccctgtgccccccatgacaaggccccctccatctaactaccagcccccaccaagcatgcagaatcacattcctcaggtatccagccctgctcccctgccccggccaatggagaaccgcacctctcctagcaagtctccattcctgcactctgggatgaaaatgcagaaggcaggtcccccagtacctgcctcgcacatagcacctgcccctgtgcagccccccatgattcggcgggatatcaccttcccacctggctctgttgaagccacacagcctgtgttgaagcagaggaggcggctcacaatgaaagacattggaaccccggaggcatggcgggtaatgatgtccctcaagtctggtctcctggcagagagcacatgggcattagataccatcaacatcctgctgtatgatgacaacagcatcatgaccttcaacctcagtcagctcccagggttgctagagctccttgtagaatatttccgacgatgcctgattgagatctttggcattttaaaggagtatgaggtgggtgacccaggacagagaacgctactggatcctgggaggttcagcaaggtgtctagtccagctcccatggagggtggggaagaagaagaagaacttctaggtcctaaactagaagaggaagaagaagaggaagtagttgaaaatgatgaggagatagccttttcaggcaaggacaagccagcttcagagaatagtgaggagaagctgatcagtaagtttgacaagcttccagtaaagatcgtacagaagaatgatccatttgtggtggactgctcagataagcttgggcgtgtgcaggagtttgacagtggcctgctgcactggcggattggtgggggggacaccactgagcatatccagacccacttcgagagcaagacagagctgctgccttcccggcctcacgcaccctgcccaccagcccctcggaagcatgtgacaacagcagagggtacaccagggacaacagaccaggaggggcccccacctgatggacctccagaaaaacggatcacagccactatggatgacatgttgtctactcggtctagcaccttgaccgaggatggagctaagagttcagaggccatcaaggagagcagcaagtttccatttggcattagcccagcacagagccaccggaacatcaagatcctagaggacgaaccccacagtaaggatgagaccccactgtgtacccttctggactggcaggattctcttgccaagcgctgcgtctgtgtgtccaataccattcgaagcctgtcatttgtgccaggcaatgactttgagatgtccaaacacccagggctgctgctcatcctgggcaagctgatcctgctgcacaacaagcacccagaacggaagcaggcaccactaacttatgaaaaggaggaggaacaggaccaaggggtgagctgcaacaaagtggagtggtggtgggactgcttggagatgctccgggaaaacaccttggttacactcgccaacatctcggggcagttggacctatctccataccccgagagcatttgcctgcctgtcctggacggactcctacactgggcagtttgcccttcagctgaagcccaggaccccttttccaccctgggccccaatgccgtcctttccccgcagagactggtcttggaaaccctcagcaaactcagcatccaggacaacaatgtggacctgattctggccacaccccccttcagccgcctggagaagttgtatagcactatggtgcgcttcctcagtgaccgaaagaacccggtgtgccgggagatggctgtggtactgctggccaacctggctcagggggacagcctggcagctcgtgccattgcagtgcagaagggcagtatcggcaacctcctgggcttcctagaggacagccttgccgccacacagttccagcagagccaggccagcctcctccacatgcagaacccaccctttgagccaactagtgtggacatgatgcggcgggctgcccgcgcgctgcttgccttggccaaggtggacgagaaccactcagagtttactctgtacgaatcacggctgttggacatctcggtatcaccgttgatgaactcattggtttcacaagtcatttgtgatgtactgtttttgattggccagtcatgacagccgtgggacacctcccccccccgtgtgtgtgtgcgtgtgtggagaacttagaaactgactgttgccctttatttatgcaaaaccacctcagaatccagtttaccctgtgctgtccagcttctcccttgggaaaaagtctctcctgtttctctctcctccttccacctcccctccctccatcacctcacgcctttctgttccttgtcctcaccttactcccctcaggaccctaccccaccctctttgaaaagacaaagctctgcctacatagaagactttttttattttaaccaaagttactgttgtttacagtgagtttggggaaaaaaaataaaataaaaatggctttcccagtccttgcatcaacgggatgccacatttcataactgtttttaatggtaaaaaaaaaaaaaaaaaatacaaaaaaaaattctgaaggacaaaaaaggtgactgctgaactgtgtgtggtttattgttgtacattcacaatcttgcaggagccaagaagttcgcagttgtgaacagaccctgttcactggagaggcctgtgcagtagagtgtagaccctttcatgtactgtactgtacacctgatactgtaaacatactgtaataataatgtctcacatggaaacagaaaacgctgggtcagcagcaagctgtagtttttaaaaatgtttttagttaaacgttgaggagaaaaaaaaaaaaggcttttcccccaaagtatcatgtgtgaacctacaacaccctgacctctttctctcctccttgattgtatgaataaccctgagatcacctcttagaactggttttaacctttagctgcagcggctacgctgccacgtgtgtatatatatgacgttgtacattgcacatacccttggatccccacagtttggtcctcctcccagctacccctttatagtatgacgagttaacaagttggtgacctgcacaaagcgagacacagctatttaatctcttgccagatatcgcccctcttggtgcgatgctgtacaggtctctgtaaaaagtccttgctgtctcagcagccaatcaacttatagtttatttttttctgggtttttgttttgttttgttttctttctaatcgaggtgtgaaaaagttctaggttcagttgaagttctgatgaagaaacacaattgagattttttcagtgataaaatctgcatatttgtatttcaacaatgtagctaaaacttgatgtaaattcctcctttttttccttttttggcttaatgaatatcatttattcagtatgaaatctttatactatatgttccacgtgttaagaataaatgtacattaaatcttggtaagacttt

SEQ ID NO: 116 - DNA, 8584 bp, Homo sapiens
cagaaagcggagagtcacagcggggccaggccctggggagcggagcctccaccgcccccctcattcccaggcaagggcttggggggaatgagccgggagagccgggtcccgagcctacagagccgggagcagctgagccgccggcgcctcggccgccgccgccgcctcctcctcctccgccgccgccagcccggagcctgagccggcggggcgggggggagaggagcgagcgcagcgcagcagcggagccccgcgaggcccgcccgggcgggtggggagggcagcccgggggactgggccccggggcggggtgggagggggggagaagacgaagacagggccgggtctctccgcggacgagacagcggggatcatggccgcgcaggtcgcccccgccgccgccagcagcctgggcaacccgccgccgccgccgccctcggagctgaagaaagccgagcagcagcagcgggaggaggcggggggcgaggcggcggcggcggcagcggccgagcgcggggaaatgaaggcagccgccgggcaggaaagcgagggccccgccgtggggccgccgcagccgctgggaaaggagctgcaggacggggccgagagcaatgggggtggcggcggcggcggagccggcagcggcggcgggcccggcgcggagccggacctgaagaactcgaacgggaacgcgggccctaggcccgccctgaacaataacctcacggagccgcccggcggcggcggtggcggcagcagcgatggggtgggggcgcctcctcactcagccgcggccgccttgccgcccccagcctacggcttcgggcaaccctacggccggagcccgtctgccgtcgccgccgccgcggccgccgtcttccaccaacaacatggcggacaacaaagccctggcctggcagcgctgcagagcggcggcggcgggggcctggagccctacgcggggccccagcagaactctcacgaccacggcttccccaaccaccagtacaactcctactaccccaaccgcagcgcctaccccccgcccgccccggcctacgcgctgagctccccgagaggtggcactccgggctccggcgcggcggcggctgccggctccaagccgcctccctcctccagcgcctccgcctcctcgtcgtcttcgtccttcgctcagcagcgcttcggggccatggggggaggcggcccctccgcggccggcgggggaactccccagcccaccgccacccccaccctcaaccaactgctcacgtcgcccagctcggcccggggctaccagggctaccccgggggcgactacagtggcgggccccaggacgggggcgccggcaagggcccggcggacatggcctcgcagtgttggggggctgcggcggcggcagctgcggcggcggccgcctcgggaggggcccaacaaaggagccaccacgcgcccatgagccccgggagcagcggcggcggggggcagccgctcgcccggacccctcagccatccagtccaatggatcagatgggcaagatgagacctcagccatatggcgggactaacccatactcgcagcaacagggacctccgtcaggaccgcagcaaggacatgggtacccagggcagccatacgggtcccagaccccgcagcggtacccgatgaccatgcagggccgggcgcagagtgccatgggcggcctctcttatacacagcagattcctccttatggacaacaaggccccagcgggtatggtcaacagggccagactccatattacaaccagcaaagtcctcaccctcagcagcagcagccaccctactcccagcaaccaccgtcccagacccctcatgcccaaccttcgtatcagcagcagccacagtctcaaccaccacagctccagtcctctcagcctccatactcccagcagccatcccagcctccacatcagcagtccccggctccatacccctcccagcagtcgacgacacagcagcacccccagagccagcccccctactcacagccacaggctcagtctccttaccagcagcagcaacctcagcagccagcaccctcgacgctctcccagcaggctgcgtatcctcagccccagtctcagcagtcccagcaaactgcctattcccagcagcgcttccctccaccgcaggagctatctcaagattcatttgggtctcaggcatcctcagccccctcaatgacctccagtaagggagggcaagaagatatgaacctgagccttcagtcaagaccctccagcttgcctgatctatctggttcaatagatgacctccccatggggacagaaggagctctgagtcctggagtgagcacatcagggatttccagcagccaaggagagcagagtaatccagctcagtctcctttctctcctcatacctcccctcacctgcctggcatccgaggcccttccccgtcccctgttggctctcccgccagtgttgctcagtctcgctcaggaccactctcgcctgctgcagtgccaggcaaccagatgccacctcggccacccagtggccagtcggacagcatcatgcatccttccatgaaccaatcaagcattgcccaagatcgaggttatatgcagaggaacccccagatgccccagtacagttccccccagcccggctcagccttatctccgcgtcagccttccggaggacagatacacacaggcatgggctcctaccagcagaactccatggggagctatggtccccaggggggtcagtatggcccacaaggtggctacccaggcagccaaactataatgccttgcccaatgccaactaccccagtgcaggcatggctggaggcataaaccccatgggtgccggaggtcaaatgcatggacagcctggcatcccaccttatggcacactccctccagggaggatgagtcacgcctccatgggcaaccggccttatggccctaacatggccaatatgccacctcaggttgggtcagggatgtgtcccccaccagggggcatgaaccggaaaacccaagaaactgctgtcgccatgcatgttgctgccaactctatccaaaacaggccgccaggctaccccaatatgaatcaagggggcatgatgggaactggacctccttatggacaagggattaatagtatggctggcatgatcaaccctcagggacccccatattccatgggtggaaccatggccaacaattctgcagggatggcagccagcccagagatgatgggccttggggatgtaaagttaactccagccaccaaaatgaacaacaaggcagatgggacacccaagacagaatccaaatccaagaaatccagttcttctactacaaccaatgagaagatcaccaagttgtatgagctgggtggtgagcctgagaggaagatgtgggtggaccgttatctggccttcactgaggagaaggccatgggcatgacaaatctgcctgctgtgggtaggaaacctctggacctctatcgcctctatgtgtctgtgaaggagattggtggattgactcaggtcaacaagaacaaaaaatggcgggaacttgcaaccaacctcaatgtgggcacatcaagcagtgctgccagctccttgaaaaagcagtatatccagtgtctctatgcctttgaatgcaagattgaacggggagaagaccctcccccagacatctttgcagctgctgattccaagaagtcccagcccaagatccagcctccctctcctgcgggatcaggatctatgcaggggccccagactccccagtcaaccagcagttccatggcagaaggaggagacttaaagccaccaactccagcatccacaccacacagtcagatccccccattgccaggcatgagcaggagcaattcagttgggatccaggatgcctttaatgatggaagtgactccacattccagaagcggaattccatgactccaaaccctgggtatcagcccagtatgaatacctctgacatgatggggcgcatgtcctatgagccaaataaggatccttatggcagcatgaggaaagctccagggagtgatcccttcatgtcctcagggcagggccccaacggcgggatgggtgacccctacagtcgtgctgccggccctgggctaggaaatgtggcgatgggaccacgacagcactatccctatggaggtccttatgacagagtgaggacggagcctggaatagggcctgagggaaacatgagcactggggccccacagccgaatctcatgccttccaacccagactcggggatgtattctcctagccgctaccccccgcagcagcagcagcagcagcagcaacgacatgattcctatggcaatcagttctccacccaaggcaccccttctggcagccccttccccagccagcagactacaatgtatcaacagcaacagcagaattacaagcggccaatggatggcacatatggccctcctgccaagcggcacgaaggggagatgtacagcgtgccatacagcactgggcaggggcagcctcagcagcagcagttgcccccagcccagccccagcctgccagccagcaacaagctgcccagccttcccctcagcaagatgtatacaaccagtatggcaatgcctatcctgccactgccacagctgctactgagcgccgaccagcaggcggcccccagaaccaatttccattccagtttggccgagaccgtgtctctgcaccccctggcaccaatgcccagcaaaacatgccaccacaaatgatgggcggccccatacaggcatcagctgaggttgctcagcaaggcaccatgtggcaggggcgtaatgacatgacctataattatgccaacaggcagagcacgggctctgccccccagggccccgcctatcatggcgtgaaccgaacagatgaaatgctgcacacagatcagagggccaaccacgaaggctcgtggccttcccatggcacacgccagcccccatatggtccctctgcccctgtgccccccatgacaaggccccctccatctaactaccagcccccaccaagcatgcagaatcacattcctcaggtatccagccctgctcccctgccccggccaatggagaaccgcacctctcctagcaagtctccattcctgcactctgggatgaaaatgcagaaggcaggtcccccagtacctgcctcgcacatagcacctgcccctgtgcagccccccatgattcggcgggatatcaccttcccacctggctctgttgaagccacacagcctgtgttgaagcagaggaggcggctcacaatgaaagacattggaaccccggaggcatggcgggtaatgatgtccctcaagtctggtctcctggcagagagcacatgggcattagataccatcaacatcctgctgtatgatgacaacagcatcatgaccttcaacctcagtcagctcccagggttgctagagctccttgtagaatatttccgacgatgcctgattgagatctttggcattttaaaggagtatgaggtgggtgacccaggacagagaacgctactggatcctgggaggttcagcaaggtgtctagtccagctcccatggagggtggggaagaagaagaagaacttctaggtcctaaactagaagaggaagaagaagaggaagtagttgaaaatgatgaggagatagccttttcaggcaaggacaagccagcttcagagaatagtgaggagaagctgatcagtaagtttgacaagcttccagtaaagatcgtacagaagaatgatccatttgtggtggactgctcagataagcttgggcgtgtgcaggagtttgacagtggcctgctgcactggcggattggtgggggggacaccactgagcatatccagacccacttcgagagcaagacagagctgctgccttcccggcctcacgcaccctgcccaccagcccctcggaagcatgtgacaacagcagagggtacaccagggacaacagaccaggaggggcccccacctgatggacctccagaaaaacggatcacagccactatggatgacatgttgtctactcggtctagcaccttgaccgaggatggagctaagagttcagaggccatcaaggagagcagcaagtttccatttggcattagcccagcacagagccaccggaacatcaagatcctagaggacgaaccccacagtaaggatgagaccccactgtgtacccttctggactggcaggattctcttgccaagcgctgcgtctgtgtgtccaataccattcgaagcctgtcatttgtgccaggcaatgactttgagatgtccaaacacccagggctgctgctcatcctgggcaagctgatcctgctgcaccacaagcacccagaacggaagcaggcaccactaacttatgaaaaggaggaggaacaggaccaaggggtgagctgcaacaaagtggagtggtggtgggactgcttggagatgctccgggaaaacaccttggttacactcgccaacatctcggggcagttggacctatctccataccccgagagcatttgcctgcctgtcctggacggactcctacactgggcagtttgcccttcagctgaagcccaggaccccttttccaccctgggccccaatgccgtcctttccccgcagagactggtcttggaaaccctcagcaaactcagcatccaggacaacaatgtggacctgattctggccacaccccccttcagccgcctggagaagttgtatagcactatggtgcgcttcctcagtgaccgaaagaacccggtgtgccgggagatggctgtggtactgctggccaacctggctcagggggacagcctggcagctcgtgccattgcagtgcagaagggcagtatcggcaacctcctgggcttcctagaggacagccttgccgccacacagttccagcagagccaggccagcctcctccacatgcagaacccaccctttgagccaactagtgtggacatgatgcggcgggctgcccgcgcgctgcttgccttggccaaggtggacgagaaccactcagagtttactctgtacgaatcacggctgttggacatctcggtatcaccgttgatgaactcattggtttcacaagtcatttgtgatgtactgtttttgattggccagtcatgacagccgtgggacacctcccccccccgtgtgtgtgtgcgtgtgtggagaacttagaaactgactgttgccctttatttatgcaaaaccacctcagaatccagtttaccctgtgctgtccagcttctcccttgggaaaaagtctctcctgtttctctctcctccttccacctcccctccctccatcacctcacgcctttctgttccttgtcctcaccttactcccctcaggaccctaccccaccctctttgaaaagacaaagctctgcctacatagaagactttttttattttaaccaaagttactgttgtttacagtgagtttggggaaaaaaaataaaataaaaatggctttcccagtccttgcatcaacgggatgccacatttcataactgtttttaatggtaaaaaaaaaaaaaaaaaatacaaaaaaaaattctgaaggacaaaaaaggtgactgctgaactgtgtgtggtttattgttgtacattcacaatcttgcaggagccaagaagttcgcagttgtgaacagaccctgttcactggagaggcctgtgcagtagagtgtagaccctttcatgtactgtactgtacacctgatactgtaaacatactgtaataataatgtctcacatggaaacagaaaacgctgggtcagcagcaagctgtagtttttaaaaatgtttttagttaaacgttgaggagaaaaaaaaaaaaggcttttcccccaaagtatcatgtgtgaacctacaacaccctgacctctttctctcctccttgattgtatgaataaccctgagatcacctcttagaactggttttaacctttagctgcagcggctacgctgccacgtgtgtatatatatgacgttgtacattgcacatacccttggatccccacagtttggtcctcctcccagctacccctttatagtatgacgagttaacaagttggtgacctgcacaaagcgagacacagctatttaatctcttgccagatatcgcccctcttggtgcgatgctgtacaggtctctgtaaaaagtccttgctgtctcagcagccaatcaacttatagtttatttttttctgggtttttgttttgttttgttttctttctaatcgaggtgtgaaaaagttctaggttcagttgaagttctgatgaagaaacacaattgagattttttcagtgataaaatctgcatatttgtatttcaacaatgtagctaaaacttgatgtaaattcctcctttttttccttttttggcttaatgaatatcatttattcagtatgaaatctttatactatatgttccacgtgttaagaataaatgtacattaaatcttggtaagacttt

SEQ ID NO: 117 - DNA, 8585 bp, Homo sapiens
cagaaagcggagagtcacagcggggccaggccctggggagcggagcctccaccgcccccctcattcccaggcaagggcttggggggaatgagccgggagagccgggtcccgagcctacagagccgggagcagctgagccgccggcgcctcggccgccgccgccgcctcctcctcctccgccgccgccagcccggagcctgagccggcggggcgggggggagaggagcgagcgcagcgcagcagcggagccccgcgaggcccgcccgggcgggtggggagggcagcccgggggactgggccccggggcggggtgggagggggggagaagacgaagacagggccgggtctctccgcggacgagacagcggggatcatggccgcgcaggtcgcccccgccgccgccagcagcctgggcaacccgccgccgccgccgccctcggagctgaagaaagccgagcagcagcagcgggaggaggcggggggcgaggcggcggcggcggcagcggccgagcgcggggaaatgaaggcagccgccgggcaggaaagcgagggccccgccgtggggccgccgcagccgctgggaaaggagctgcaggacggggccgagagcaatgggggtggcggcggcggcggagccggcagcggcggcgggcccggcgcggagccggacctgaagaactcgaacgggaacgcgggccctaggcccgccctgaacaataacctcacggagccgcccggcggcggcggtggcggcagcagcgatggggtgggggcgcctcctcactcagccgcggccgccttgccgcccccagcctacggcttcgggcaaccctacggccggagcccgtctgccgtcgccgccgccgcggccgccgtcttccaccaacaacatggcggacaacaaagccctggcctggcagcgctgcagagcggcggcggcgggggcctggagccctacgcggggccccagcagaactctcacgaccacggcttccccaaccaccagtacaactcctactaccccaaccgcagcgcctaccccccgcccgccccggcctacgcgctgagctccccgagaggtggcactccgggctccggcgcggcggcggctgccggctccaagccgcctccctcctccagcgcctccgcctcctcgtcgtcttcgtccttcgctcagcagcgcttcggggccatggggggaggcggcccctccgcggccggcgggggaactccccagcccaccgccacccccaccctcaaccaactgctcacgtcgcccagctcggcccggggctaccagggctaccccgggggcgactacagtggcgggccccaggacgggggcgccggcaagggcccggcggacatggcctcgcagtgttggggggctgcggcggcggcagctgcggcggcggccgcctcgggaggggcccaacaaaggagccaccacgcgcccatgagccccgggagcagcggcggcggggggcagccgctcgcccggacccctcagccatccagtccaatggatcagatgggcaagatgagacctcagccatatggcgggactaacccatactcgcagcaacagggacctccgtcaggaccgcagcaaggacatgggtacccagggcagccatacgggtcccagaccccgcagcggtacccgatgaccatgcagggccgggcgcagagtgccatgggcggcctctcttatacacagcagattcctccttatggacaacaaggccccagcgggtatggtcaacagggccagactccatattacaaccagcaaagtcctcaccctcagcagcagcagccaccctactcccagcaaccaccgtcccagacccctcatgcccaaccttcgtatcagcagcagccacagtctcaaccaccacagctccagtcctctcagcctccatactcccagcagccatcccagcctccacatcagcagtccccggctccatacccctcccagcagtcgacgacacagcagcacccccagagccagcccccctactcacagccacaggctcagtctccttaccagcagcagcaacctcagcagccagcaccctcgacgctctcccagcaggctgcgtatcctcagccccagtctcagcagtcccagcaaactgcctattcccagcagcgcttccctccaccgcaggagctatctcaagattcatttgggtctcaggcatcctcagccccctcaatgacctccagtaagggagggcaagaagatatgaacctgagccttcagtcaagaccctccagcttgcctgatctatctggttcaatagatgacctccccatggggacagaaggagctctgagtcctggagtgagcacatcagggatttccagcagccaaggagagcagagtaatccagctcagtctcctttctctcctcatacctcccctcacctgcctggcatccgaggcccttccccgtcccctgttggctctcccgccagtgttgctcagtctcgctcaggaccactctcgcctgctgcagtgccaggcaaccagatgccacctcggccacccagtggccagtcggacagcatcatgcatccttccatgaaccaatcaagcattgcccaagatcgaggttatatgcagaggaacccccagatgccccagtacagttccccccagcccggctcagccttatctccgcgtcagccttccggaggacagatacacacaggcatgggctcctaccagcagaactccatggggagctatggtccccaggggggtcagtatggcccacaaggtggctaccccaggcagccaaactataatgccttgcccaatgccaactaccccagtgcaggcatggctggaggcataaaccccatgggtgccggaggtcaaatgcatggacagcctggcatcccaccttatggcacactccctccagggaggatgagtcacgcctccatgggcaaccggccttatggccctaacatggccaatatgccacctcaggttgggtcagggatgtgtcccccaccagggggcatgaaccggaaaacccaagaaactgctgtcgccatgcatgttgctgccaactctatccaaaacaggccgccaggctaccccaatatgaatcaagggggcatgatgggaactggacctccttatggacaagggattaatagtatggctggcatgatcaaccctcagggacccccatattccatgggtggaaccatggccaacaattctgcagggatggcagccagcccagagatgatgggccttggggatgtaaagttaactccagccaccaaaatgaacaacaaggcagatgggacacccaagacagaatccaaatccaagaaatccagttcttctactacaaccaatgagaagatcaccaagttgtatgagctgggtggtgagcctgagaggaagatgtgggtggaccgttatctggccttcactgaggagaaggccatgggcatgacaaatctgcctgctgtgggtaggaaacctctggacctctatcgcctctatgtgtctgtgaaggagattggtggattgactcaggtcaacaagaacaaaaaatggcgggaacttgcaaccaacctcaatgtgggcacatcaagcagtgctgccagctccttgaaaaagcagtatatccagtgtctctatgcctttgaatgcaagattgaacggggagaagaccctcccccagacatctttgcagctgctgattccaagaagtcccagcccaagatccagcctccctctcctgcgggatcaggatctatgcaggggccccagactccccagtcaaccagcagttccatggcagaaggaggagacttaaagccaccaactccagcatccacaccacacagtcagatccccccattgccaggcatgagcaggagcaattcagttgggatccaggatgcctttaatgatggaagtgactccacattccagaagcggaattccatgactccaaaccctgggtatcagcccagtatgaatacctctgacatgatggggcgcatgtcctatgagccaaataaggatccttatggcagcatgaggaaagctccagggagtgatcccttcatgtcctcagggcagggccccaacggcgggatgggtgacccctacagtcgtgctgccggccctgggctaggaaatgtggcgatgggaccacgacagcactatccctatggaggtccttatgacagagtgaggacggagcctggaatagggcctgagggaaacatgagcactggggccccacagccgaatctcatgccttccaacccagactcggggatgtattctcctagccgctaccccccgcagcagcagcagcagcagcagcaacgacatgattcctatggcaatcagttctccacccaaggcaccccttctggcagccccttccccagccagcagactacaatgtatcaacagcaacagcagaattacaagcggccaatggatggcacatatggccctcctgccaagcggcacgaaggggagatgtacagcgtgccatacagcactgggcaggggcagcctcagcagcagcagttgcccccagcccagccccagcctgccagccagcaacaagctgcccagccttcccctcagcaagatgtatacaaccagtatggcaatgcctatcctgccactgccacagctgctactgagcgccgaccagcaggcggcccccagaaccaatttccattccagtttggccgagaccgtgtctctgcaccccctggcaccaatgcccagcaaaacatgccaccacaaatgatgggcggccccatacaggcatcagctgaggttgctcagcaaggcaccatgtggcaggggcgtaatgacatgacctataattatgccaacaggcagagcacgggctctgccccccagggccccgcctatcatggcgtgaaccgaacagatgaaatgctgcacacagatcagagggccaaccacgaaggctcgtggccttcccatggcacacgccagcccccatatggtccctctgcccctgtgccccccatgacaaggccccctccatctaactaccagcccccaccaagcatgcagaatcacattcctcaggtatccagccctgctcccctgccccggccaatggagaaccgcacctctcctagcaagtctccattcctgcactctgggatgaaaatgcagaaggcaggtcccccagtacctgcctcgcacatagcacctgcccctgtgcagccccccatgattcggcgggatatcaccttcccacctggctctgttgaagccacacagcctgtgttgaagcagaggaggcggctcacaatgaaagacattggaaccccggaggcatggcgggtaatgatgtccctcaagtctggtctcctggcagagagcacatgggcattagataccatcaacatcctgctgtatgatgacaacagcatcatgaccttcaacctcagtcagctcccagggttgctagagctccttgtagaatatttccgacgatgcctgattgagatctttggcattttaaaggagtatgaggtgggtgacccaggacagagaacgctactggatcctgggaggttcagcaaggtgtctagtccagctcccatggagggtggggaagaagaagaagaacttctaggtcctaaactagaagaggaagaagaagaggaagtagttgaaaatgatgaggagatagccttttcaggcaaggacaagccagcttcagagaatagtgaggagaagctgatcagtaagtttgacaagcttccagtaaagatcgtacagaagaatgatccatttgtggtggactgctcagataagcttgggcgtgtgtaggagtttgacagtggcctgctgcactggcggattggtgggggggacaccactgagcatatccagacccacttcgagagcaagacagagctgctgccttcccggcctcacgcaccctgcccaccagcccctcggaagcatgtgacaacagcagagggtacaccagggacaacagaccaggaggggcccccacctgatggacctccagaaaaacggatcacagccactatggatgacatgttgtctactcggtctagcaccttgaccgaggatggagctaagagttcagaggccatcaaggagagcagcaagtttccatttggcattagcccagcacagagccaccggaacatcaagatcctagaggacgaaccccacagtaaggatgagaccccactgtgtacccttctggactggcaggattctcttgccaagcgctgcgtctgtgtgtccaataccattcgaagcctgtcatttgtgccaggcaatgactttgagatgtccaaacacccagggctgctgctcatcctgggcaagctgatcctgctgcaccacaagcacccagaacggaagcaggcaccactaacttatgaaaaggaggaggaacaggaccaaggggtgagctgcaacaaagtggagtggtggtgggactgcttggagatgctccgggaaaacaccttggttacactcgccaacatctcggggcagttggacctatctccataccccgagagcatttgcctgcctgtcctggacggactcctacactgggcagtttgcccttcagctgaagcccaggaccccttttccaccctgggccccaatgccgtcctttccccgcagagactggtcttggaaaccctcagcaaactcagcatccaggacaacaatgtggacctgattctggccacaccccccttcagccgcctggagaagttgtatagcactatggtgcgcttcctcagtgaccgaaagaacccggtgtgccgggagatggctgtggtactgctggccaacctggctcagggggacagcctggcagctcgtgccattgcagtgcagaagggcagtatcggcaacctcctgggcttcctagaggacagccttgccgccacacagttccagcagagccaggccagcctcctccacatgcagaacccaccctttgagccaactagtgtggacatgatgcggcgggctgcccgcgcgctgcttgccttggccaaggtggacgagaaccactcagagtttactctgtacgaatcacggctgttggacatctcggtatcaccgttgatgaactcattggtttcacaagtcatttgtgatgtactgtttttgattggccagtcatgacagccgtgggacacctcccccccccgtgtgtgtgtgcgtgtgtggagaacttagaaactgactgttgccctttatttatgcaaaaccacctcagaatccagtttaccctgtgctgtccagcttctcccttgggaaaaagtctctcctgtttctctctcctccttccacctcccctccctccatcacctcacgcctttctgttccttgtcctcaccttactcccctcaggaccctaccccaccctctttgaaaagacaaagctctgcctacatagaagactttttttattttaaccaaagttactgttgtttacagtgagtttggggaaaaaaaataaaataaaaatggctttcccagtccttgcatcaacgggatgccacatttcataactgtttttaatggtaaaaaaaaaaaaaaaaaatacaaaaaaaaattctgaaggacaaaaaaggtgactgctgaactgtgtgtggtttattgttgtacattcacaatcttgcaggagccaagaagttcgcagttgtgaacagaccctgttcactggagaggcctgtgcagtagagtgtagaccctttcatgtactgtactgtacacctgatactgtaaacatactgtaataataatgtctcacatggaaacagaaaacgctgggtcagcagcaagctgtagtttttaaaaatgtttttagttaaacgttgaggagaaaaaaaaaaaaggcttttcccccaaagtatcatgtgtgaacctacaacaccctgacctctttctctcctccttgattgtatgaataaccctgagatcacctcttagaactggttttaacctttagctgcagcggctacgctgccacgtgtgtatatatatgacgttgtacattgcacatacccttggatccccacagtttggtcctcctcccagctacccctttatagtatgacgagttaacaagttggtgacctgcacaaagcgagacacagctatttaatctcttgccagatatcgcccctcttggtgcgatgctgtacaggtctctgtaaaaagtccttgctgtctcagcagccaatcaacttatagtttatttttttctgggtttttgttttgttttgttttctttctaatcgaggtgtgaaaaagttctaggttcagttgaagttctgatgaagaaacacaattgagattttttcagtgataaaatctgcatatttgtatttcaacaatgtagctaaaacttgatgtaaattcctcctttttttccttttttggcttaatgaatatcatttattcagtatgaaatctttatactatatgttccacgtgttaagaataaatgtacattaaatcttggtaagacttt

SEQ ID NO: 118 - DNA, 8585 bp, Homo sapiens
cagaaagcggagagtcacagcggggccaggccctggggagcggagcctccaccgcccccctcattcccaggcaagggcttggggggaatgagccgggagagccgggtcccgagcctacagagccgggagcagctgagccgccggcgcctcggccgccgccgccgcctcctcctcctccgccgccgccagcccggagcctgagccggcggggcgggggggagaggagcgagcgcagcgcagcagcggagccccgcgaggcccgcccgggcgggtggggagggcagcccgggggactgggccccggggcggggtgggagggggggagaagacgaagacagggccgggtctctccgcggacgagacagcggggatcatggccgcgcaggtcgcccccgccgccgccagcagcctgggcaacccgccgccgccgccgccctcggagctgaagaaagccgagcagcagcagcgggaggaggcggggggcgaggcggcggcggcggcagcggccgagcgcggggaaatgaaggcagccgccgggcaggaaagcgagggccccgccgtggggccgccgcagccgctgggaaaggagctgcaggacggggccgagagcaatgggggtggcggcggcggcggagccggcagcggcggcgggcccggcgcggagccggacctgaagaactcgaacgggaacgcgggccctaggcccgccctgaacaataacctcacggagccgcccggcggcggcggtggcggcagcagcgatggggtgggggcgcctcctcactcagccgcggccgccttgccgcccccagcctacggcttcgggcaaccctacggccggagcccgtctgccgtcgccgccgccgcggccgccgtcttccaccaacaacatggcggacaacaaagccctggcctggcagcgctgcagagcggcggcggcgggggcctggagccctacgcggggccccagcagaactctcacgaccacggcttccccaaccaccagtacaactcctactaccccaaccgcagcgcctaccccccgcccgccccggcctacgcgctgagctccccgagaggtggcactccgggctccggcgcggcggcggctgccggctccaagccgcctccctcctccagcgcctccgcctcctcgtcgtcttcgtccttcgctcagcagcgcttcggggccatggggggaggcggcccctccgcggccggcgggggaactccccagcccaccgccacccccaccctcaaccaactgctcacgtcgcccagctcggcccggggctaccagggctaccccgggggcgactacagtggcgggccccaggacgggggcgccggcaagggcccggcggacatggcctcgcagtgttggggggctgcggcggcggcagctgcggcggcggccgcctcgggaggggcccaacaaaggagccaccacgcgcccatgagccccgggagcagcggcggcggggggcagccgctcgcccggacccctcagccatccagtccaatggatcagatgggcaagatgagacctcagccatatggcgggactaacccatactcgcagcaacagggacctccgtcaggaccgcagcaaggacatgggtacccagggcagccatacgggtcccagaccccgcagcggtacccgatgaccatgcagggccgggcgcagagtgccatgggcggcctctcttatacacagcagattcctccttatggacaacaaggccccagcgggtatggtcaacagggccagactccatattacaaccagcaaagtcctcaccctcagcagcagcagccaccctactcccagcaaccaccgtcccagacccctcatgcccaaccttcgtatcagcagcagccacagtctcaaccaccacagctccagtcctctcagcctccatactcccagcagccatcccagcctccacatcagcagtccccggctccatacccctcccagcagtcgacgacacagcagcacccccagagccagcccccctactcacagccacaggctcagtctccttaccagcagcagcaacctcagcagccagcaccctcgacgctctcccagcaggctgcgtatcctcagccccagtctcagcagtcccagcaaactgcctattcccagcagcgcttccctccaccgcaggagctatctcaagattcatttgggtctcaggcatcctcagccccctcaatgacctccagtaagggagggcaagaagatatgaacctgagccttcagtcaagaccctccagcttgcctgatctatctggttcaatagatgacctccccatggggacagaaggagctctgagtcctggagtgagcacatcagggatttccagcagccaaggagagcagagtaatccagctcagtctcctttctctcctcatacctcccctcacctgcctggcatccgaggcccttccccgtcccctgttggctctcccgccagtgttgctcagtctcgctcaggaccactctcgcctgctgcagtgccaggcaaccagatgccacctcggccacccagtggccagtcggacagcatcatgcatccttccatgaaccaatcaagcattgcccaagatcgaggttatatgcagaggaacccccagatgccccagtacagttccccccagcccggctcagccttatctccgcgtcagccttccggaggacagatacacacaggcatgggctcctaccagcagaactccatggggagctatggtccccaggggggtcagtatggcccacaaggtggctaccccaggcagccaaactataatgccttgcccaatgccaactaccccagtgcaggcatggctggaggcataaaccccatgggtgccggaggtcaaatgcatggacagcctggcatcccaccttatggcacactccctccagggaggatgagtcacgcctccatgggcaaccggccttatggccctaacatggccaatatgccacctcaggttgggtcagggatgtgtcccccaccagggggcatgaaccggaaaacccaagaaactgctgtcgccatgcatgttgctgccaactctatccaaaacaggccgccaggctaccccaatatgaatcaagggggcatgatgggaactggacctccttatggacaagggattaatagtatggctggcatgatcaaccctcagggacccccatattccatgggtggaaccatggccaacaattctgcagggatggcagccagcccagagatgatgggccttggggatgtaaagttaactccagccaccaaaatgaacaacaaggcagatgggacacccaagacagaatccaaatccaagaaatccagttcttctactacaaccaatgagaagatcaccaagttgtatgagctgggtggtgagcctgagaggaagatgtgggtggaccgttatctggccttcactgaggagaaggccatgggcatgacaaatctgcctgctgtgggtaggaaacctctggacctctatcgcctctatgtgtctgtgaaggagattggtggattgactcaggtcaacaagaacaaaaaatggcgggaacttgcaaccaacctcaatgtgggcacatcaagcagtgctgccagctccttgaaaaagcagtatatccagtgtctctatgcctttgaatgcaagattgaacggggagaagaccctcccccagacatctttgcagctgctgattccaagaagtcccagcccaagatccagcctccctctcctgcgggatcaggatctatgcaggggccccagactccccagtcaaccagcagttccatggcagaaggaggagacttaaagccaccaactccagcatccacaccacacagtcagatccccccattgccaggcatgagcaggagcaattcagttgggatccaggatgcctttaatgatggaagtgactccacattccagaagcggaattccatgactccaaaccctgggtatcagcccagtatgaatacctctgacatgatggggcgcatgtcctatgagccaaataaggatccttatggcagcatgaggaaagctccagggagtgatcccttcatgtcctcagggcagggccccaacggcgggatgggtgacccctacagtcgtgctgccggccctgggctaggaaatgtggcgatgggaccacgacagcactatccctatggaggtccttatgacagagtgaggacggagcctggaatagggcctgagggaaacatgagcactggggccccacagccgaatctcatgccttccaacccagactcggggatgtattctcctagccgctaccccccgcagcagcagcagcagcagcagcaacgacatgattcctatggcaatcagttctccacccaaggcaccccttctggcagccccttccccagccagcagactacaatgtatcaacagcaacagcagaattacaagcggccaatggatggcacatatggccctcctgccaagcggcacgaaggggagatgcacagcgtgccatacagcactgggcaggggcagcctcagcagcagcagttgcccccagcccagccccagcctgccagccagcaacaagctgcccagccttcccctcagcaagatgtatacaaccagtatggcaatgcctatcctgccactgccacagctgctactgagcgccgaccagcaggcggcccccagaaccaatttccattccagtttggccgagaccgtgtctctgcaccccctggcaccaatgcccagcaaaacatgccaccacaaatgatgggcggccccatacaggcatcagctgaggttgctcagcaaggcaccatgtggcaggggcgtaatgacatgacctataattatgccaacaggcagagcacgggctctgccccccagggccccgcctatcatggcgtgaaccgaacagatgaaatgctgcacacagatcagagggccaaccacgaaggctcgtggccttcccatggcacacgccagcccccatatggtccctctgcccctgtgccccccatgacaaggccccctccatctaactaccagcccccaccaagcatgcagaatcacattcctcaggtatccagccctgctcccctgccccggccaatggagaaccgcacctctcctagcaagtctccattcctgcactctgggatgaaaatgcagaaggcaggtcccccagtacctgcctcgcacatagcacctgcccctgtgcagccccccatgattcggcgggatatcaccttcccacctggctctgttgaagccacacagcctgtgttgaagcagaggaggcggctcacaatgaaagacattggaaccccggaggcatggcgggtaatgatgtccctcaagtctggtctcctggcagagagcacatgggcattagataccatcaacatcctgctgtatgatgacaacagcatcatgaccttcaacctcagtcagctcccagggttgctagagctccttgtagaatatttccgacgatgcctgattgagatctttggcattttaaaggagtatgaggtgggtgacccaggacagagaacgctactggatcctgggaggttcagcaaggtgtctagtccagctcccatggagggtggggaagaagaagaagaacttctaggtcctaaactagaagaggaagaagaagaggaagtagttgaaaatgatgaggagatagccttttcaggcaaggacaagccagcttcagagaatagtgaggagaagctgatcagtaagtttgacaagcttccagtaaagatcgtacagaagaatgatccatttgtggtggactgctcagataagcttgggcgtgtgcaggagtttgacagtggcctgctgcactggcggattggtgggggggacaccactgagcatatccagacccacttcgagagcaagacagagctgctgccttcccggcctcacgcaccctgcccaccagcccctcggaagcatgtgacaacagcagagggtacaccagggacaacagaccaggaggggcccccacctgatggacctccagaaaaacggatcacagccactatggatgacatgttgtctactcggtctagcaccttgaccgaggatggagctaagagttcagaggccatcaaggagagcagcaagtttccatttggcattagcccagcacagagccaccggaacatcaagatcctagaggacgaaccccacagtaaggatgagaccccactgtgtacccttctggactggcaggattctcttgccaagcgctgcgtctgtgtgtccaataccattcgaagcctgtcatttgtgccaggcaatgactttgagatgtccaaacacccagggctgctgctcatcctgggcaagctgatcctgctgcaccacaagcacccagaacggaagcaggcaccactaacttatgaaaaggaggaggaacaggaccaaggggtgagctgcaacaaagtggagtggtggtgggactgcttggagatgctccgggaaaacaccttggttacactcgccaacatctcggggcagttggacctatctccataccccgagagcatttgcctgcctgtcctggacggactcctacactgggcagtttgcccttcagctgaagcccaggaccccttttccaccctgggccccaatgccgtcctttccccgcagagactggtcttggaaaccctcagcaaactcagcatccaggacaacaatgtggacctgattctggccacaccccccttcagccgcctggagaagttgtatagcactatggtgcgcttcctcagtgaccgaaagaacccggtgtgccgggagatggctgtggtactgctggccaacctggctcagggggacagcctggcagctcgtgccattgcagtgcagaagggcagtatcggcaacctcctgggcttcctagaggacagccttgccgccacacagttccagcagagccaggccagcctcctccacatgcagaacccaccctttgagccaactagtgtggacatgatgcggcgggctgcccgcgcgctgcttgccttggccaaggtggacgagaaccactcagagtttactctgtacgaatcacggctgttggacatctcggtatcaccgttgatgaactcattggtttcacaagtcatttgtgatgtactgtttttgattggccagtcatgacagccgtgggacacctcccccccccgtgtgtgtgtgcgtgtgtggagaacttagaaactgactgttgccctttatttatgcaaaaccacctcagaatccagtttaccctgtgctgtccagcttctcccttgggaaaaagtctctcctgtttctctctcctccttccacctcccctccctccatcacctcacgcctttctgttccttgtcctcaccttactcccctcaggaccctaccccaccctctttgaaaagacaaagctctgcctacatagaagactttttttattttaaccaaagttactgttgtttacagtgagtttggggaaaaaaaataaaataaaaatggctttcccagtccttgcatcaacgggatgccacatttcataactgtttttaatggtaaaaaaaaaaaaaaaaaatacaaaaaaaaattctgaaggacaaaaaaggtgactgctgaactgtgtgtggtttattgttgtacattcacaatcttgcaggagccaagaagttcgcagttgtgaacagaccctgttcactggagaggcctgtgcagtagagtgtagaccctttcatgtactgtactgtacacctgatactgtaaacatactgtaataataatgtctcacatggaaacagaaaacgctgggtcagcagcaagctgtagtttttaaaaatgtttttagttaaacgttgaggagaaaaaaaaaaaaggcttttcccccaaagtatcatgtgtgaacctacaacaccctgacctctttctctcctccttgattgtatgaataaccctgagatcacctcttagaactggttttaacctttagctgcagcggctacgctgccacgtgtgtatatatatgacgttgtacattgcacatacccttggatccccacagtttggtcctcctcccagctacccctttatagtatgacgagttaacaagttggtgacctgcacaaagcgagacacagctatttaatctcttgccagatatcgcccctcttggtgcgatgctgtacaggtctctgtaaaaagtccttgctgtctcagcagccaatcaacttatagtttatttttttctgggtttttgttttgttttgttttctttctaatcgaggtgtgaaaaagttctaggttcagttgaagttctgatgaagaaacacaattgagattttttcagtgataaaatctgcatatttgtatttcaacaatgtagctaaaacttgatgtaaattcctcctttttttccttttttggcttaatgaatatcatttattcagtatgaaatctttatactatatgttccacgtgttaagaataaatgtacattaaatcttggtaagacttt

SEQ ID NO: 119 - DNA, 8585 bp, Homo sapiens
cagaaagcggagagtcacagcggggccaggccctggggagcggagcctccaccgcccccctcattcccaggcaagggcttggggggaatgagccgggagagccgggtcccgagcctacagagccgggagcagctgagccgccggcgcctcggccgccgccgccgcctcctcctcctccgccgccgccagcccggagcctgagccggcggggcgggggggagaggagcgagcgcagcgcagcagcggagccccgcgaggcccgcccgggcgggtggggagggcagcccgggggactgggccccggggcggggtgggagggggggagaagacgaagacagggccgggtctctccgcggacgagacagcggggatcatggccgcgcaggtcgcccccgccgccgccagcagcctgggcaacccgccgccgccgccgccctcggagctgaagaaagccgagcagcagcagcgggaggaggcggggggcgaggcggcggcggcggcagcggccgagcgcggggaaatgaaggcagccgccgggcaggaaagcgagggccccgccgtggggccgccgcagccgctgggaaaggagctgcaggacggggccgagagcaatgggggtggcggcggcggcggagccggcagcggcggcgggcccggcgcggagccggacctgaagaactcgaacgggaacgcgggccctaggcccgccctgaacaataacctcacggagccgcccggcggcggcggtggcggcagcagcgatggggtgggggcgcctcctcactcagccgcggccgccttgccgcccccagcctacggcttcgggcaaccctacggccggagcccgtctgccgtcgccgccgccgcggccgccgtcttccaccaacaacatggcggacaacaaagccctggcctggcagcgctgcagagcggcggcggcgggggcctggagccctacgcggggccccagcagaactctcacgaccacggcttccccaaccaccagtacaactcctactaccccaaccgcagcgcctaccccccgcccgccccggcctacgcgctgagctccccgagaggtggcactccgggctccggcgcggcggcggctgccggctccaagccgcctccctcctccagcgcctccgcctcctcgtcgtcttcgtccttcgctcagcagcgcttcggggccatggggggaggcggcccctccgcggccggcgggggaactccccagcccaccgccacccccaccctcaaccaactgctcacgtcgcccagctcggcccggggctaccagggctaccccgggggcgactacagtggcgggccccaggacgggggcgccggcaagggcccggcggacatggcctcgcagtgttggggggctgcggcggcggcagctgcggcggcggccgcctcgggaggggcccaacaaaggagccaccacgcgcccatgagccccgggagcagcggcggcggggggcagccgctcgcccggacccctcagccatccagtccaatggatcagatgggcaagatgagacctcagccatatggcgggactaacccatactcgcagcaacagggacctccgtcaggaccgcagcaaggacatgggtacccagggcagccatacgggtcccagaccccgcagcggtacccgatgaccatgcagggccgggcgcagagtgccatgggcggcctctcttatacacagcagattcctccttatggacaacaaggccccagcgggtatggtcaacagggccagactccatattacaaccagcaaagtcctcaccctcagcagcagcagccaccctactcccagcaaccaccgtcccagacccctcatgcccaaccttcgtatcagcagcagccacagtctcaaccaccacagctccagtcctctcagcctccatactcccagcagccatcccagcctccacatcagcagtccccggctccatacccctcccagcagtcgacgacacagcagcacccccagagccagcccccctactcacagccacaggctcagtctccttaccagcagcagcaacctcagcagccagcaccctcgacgctctcccagcaggctgcgtatcctcagccccagtctcagcagtcccagcaaactgcctattcccagcagcgcttccctccaccgcaggagctatctcaagattcatttgggtctcaggcatcctcagccccctcaatgacctccagtaagggagggcaagaagatatgaacctgagccttcagtcaagaccctccagcttgcctgatctatctggttcaatagatgacctccccatggggacagaaggagctctgagtcctggagtgagcacatcagggatttccagcagccaaggagagcagagtaatccagctcagtctcctttctctcctcatacctcccctcacctgcctggcatccgaggcccttccccgtcccctgttggctctcccgccagtgttgctccgtctcgctcaggaccactctcgcctgctgcagtgccaggcaaccagatgccacctcggccacccagtggccagtcggacagcatcatgcatccttccatgaaccaatcaagcattgcccaagatcgaggttatatgcagaggaacccccagatgccccagtacagttccccccagcccggctcagccttatctccgcgtcagccttccggaggacagatacacacaggcatgggctcctaccagcagaactccatggggagctatggtccccaggggggtcagtatggcccacaaggtggctaccccaggcagccaaactataatgccttgcccaatgccaactaccccagtgcaggcatggctggaggcataaaccccatgggtgccggaggtcaaatgcatggacagcctggcatcccaccttatggcacactccctccagggaggatgagtcacgcctccatgggcaaccggccttatggccctaacatggccaatatgccacctcaggttgggtcagggatgtgtcccccaccagggggcatgaaccggaaaacccaagaaactgctgtcgccatgcatgttgctgccaactctatccaaaacaggccgccaggctaccccaatatgaatcaagggggcatgatgggaactggacctccttatggacaagggattaatagtatggctggcatgatcaaccctcagggacccccatattccatgggtggaaccatggccaacaattctgcagggatggcagccagcccagagatgatgggccttggggatgtaaagttaactccagccaccaaaatgaacaacaaggcagatgggacacccaagacagaatccaaatccaagaaatccagttcttctactacaaccaatgagaagatcaccaagttgtatgagctgggtggtgagcctgagaggaagatgtgggtggaccgttatctggccttcactgaggagaaggccatgggcatgacaaatctgcctgctgtgggtaggaaacctctggacctctatcgcctctatgtgtctgtgaaggagattggtggattgactcaggtcaacaagaacaaaaaatggcgggaacttgcaaccaacctcaatgtgggcacatcaagcagtgctgccagctccttgaaaaagcagtatatccagtgtctctatgcctttgaatgcaagattgaacggggagaagaccctcccccagacatctttgcagctgctgattccaagaagtcccagcccaagatccagcctccctctcctgcgggatcaggatctatgcaggggccccagactccccagtcaaccagcagttccatggcagaaggaggagacttaaagccaccaactccagcatccacaccacacagtcagatccccccattgccaggcatgagcaggagcaattcagttgggatccaggatgcctttaatgatggaagtgactccacattccagaagcggaattccatgactccaaaccctgggtatcagcccagtatgaatacctctgacatgatggggcgcatgtcctatgagccaaataaggatccttatggcagcatgaggaaagctccagggagtgatcccttcatgtcctcagggcagggccccaacggcgggatgggtgacccctacagtcgtgctgccggccctgggctaggaaatgtggcgatgggaccacgacagcactatccctatggaggtccttatgacagagtgaggacggagcctggaatagggcctgagggaaacatgagcactggggccccacagccgaatctcatgccttccaacccagactcggggatgtattctcctagccgctaccccccgcagcagcagcagcagcagcagcaacgacatgattcctatggcaatcagttctccacccaaggcaccccttctggcagccccttccccagccagcagactacaatgtatcaacagcaacagcagaattacaagcggccaatggatggcacatatggccctcctgccaagcggcacgaaggggagatgtacagcgtgccatacagcactgggcaggggcagcctcagcagcagcagttgcccccagcccagccccagcctgccagccagcaacaagctgcccagccttcccctcagcaagatgtatacaaccagtatggcaatgcctatcctgccactgccacagctgctactgagcgccgaccagcaggcggcccccagaaccaatttccattccagtttggccgagaccgtgtctctgcaccccctggcaccaatgcccagcaaaacatgccaccacaaatgatgggcggccccatacaggcatcagctgaggttgctcagcaaggcaccatgtggcaggggcgtaatgacatgacctataattatgccaacaggcagagcacgggctctgccccccagggccccgcctatcatggcgtgaaccgaacagatgaaatgctgcacacagatcagagggccaaccacgaaggctcgtggccttcccatggcacacgccagcccccatatggtccctctgcccctgtgccccccatgacaaggccccctccatctaactaccagcccccaccaagcatgcagaatcacattcctcaggtatccagccctgctcccctgccccggccaatggagaaccgcacctctcctagcaagtctccattcctgcactctgggatgaaaatgcagaaggcaggtcccccagtacctgcctcgcacatagcacctgcccctgtgcagccccccatgattcggcgggatatcaccttcccacctggctctgttgaagccacacagcctgtgttgaagcagaggaggcggctcacaatgaaagacattggaaccccggaggcatggcgggtaatgatgtccctcaagtctggtctcctggcagagagcacatgggcattagataccatcaacatcctgctgtatgatgacaacagcatcatgaccttcaacctcagtcagctcccagggttgctagagctccttgtagaatatttccgacgatgcctgattgagatctttggcattttaaaggagtatgaggtgggtgacccaggacagagaacgctactggatcctgggaggttcagcaaggtgtctagtccagctcccatggagggtggggaagaagaagaagaacttctaggtcctaaactagaagaggaagaagaagaggaagtagttgaaaatgatgaggagatagccttttcaggcaaggacaagccagcttcagagaatagtgaggagaagctgatcagtaagtttgacaagcttccagtaaagatcgtacagaagaatgatccatttgtggtggactgctcagataagcttgggcgtgtgcaggagtttgacagtggcctgctgcactggcggattggtgggggggacaccactgagcatatccagacccacttcgagagcaagacagagctgctgccttcccggcctcacgcaccctgcccaccagcccctcggaagcatgtgacaacagcagagggtacaccagggacaacagaccaggaggggcccccacctgatggacctccagaaaaacggatcacagccactatggatgacatgttgtctactcggtctagcaccttgaccgaggatggagctaagagttcagaggccatcaaggagagcagcaagtttccatttggcattagcccagcacagagccaccggaacatcaagatcctagaggacgaaccccacagtaaggatgagaccccactgtgtacccttctggactggcaggattctcttgccaagcgctgcgtctgtgtgtccaataccattcgaagcctgtcatttgtgccaggcaatgactttgagatgtccaaacacccagggctgctgctcatcctgggcaagctgatcctgctgcaccacaagcacccagaacggaagcaggcaccactaacttatgaaaaggaggaggaacaggaccaaggggtgagctgcaacaaagtggagtggtggtgggactgcttggagatgctccgggaaaacaccttggttacactcgccaacatctcggggcagttggacctatctccataccccgagagcatttgcctgcctgtcctggacggactcctacactgggcagtttgcccttcagctgaagcccaggaccccttttccaccctgggccccaatgccgtcctttccccgcagagactggtcttggaaaccctcagcaaactcagcatccaggacaacaatgtggacctgattctggccacaccccccttcagccgcctggagaagttgtatagcactatggtgcgcttcctcagtgaccgaaagaacccggtgtgccgggagatggctgtggtactgctggccaacctggctcagggggacagcctggcagctcgtgccattgcagtgcagaagggcagtatcggcaacctcctgggcttcctagaggacagccttgccgccacacagttccagcagagccaggccagcctcctccacatgcagaacccaccctttgagccaactagtgtggacatgatgcggcgggctgcccgcgcgctgcttgccttggccaaggtggacgagaaccactcagagtttactctgtacgaatcacggctgttggacatctcggtatcaccgttgatgaactcattggtttcacaagtcatttgtgatgtactgtttttgattggccagtcatgacagccgtgggacacctcccccccccgtgtgtgtgtgcgtgtgtggagaacttagaaactgactgttgccctttatttatgcaaaaccacctcagaatccagtttaccctgtgctgtccagcttctcccttgggaaaaagtctctcctgtttctctctcctccttccacctcccctccctccatcacctcacgcctttctgttccttgtcctcaccttactcccctcaggaccctaccccaccctctttgaaaagacaaagctctgcctacatagaagactttttttattttaaccaaagttactgttgtttacagtgagtttggggaaaaaaaataaaataaaaatggctttcccagtccttgcatcaacgggatgccacatttcataactgtttttaatggtaaaaaaaaaaaaaaaaaatacaaaaaaaaattctgaaggacaaaaaaggtgactgctgaactgtgtgtggtttattgttgtacattcacaatcttgcaggagccaagaagttcgcagttgtgaacagaccctgttcactggagaggcctgtgcagtagagtgtagaccctttcatgtactgtactgtacacctgatactgtaaacatactgtaataataatgtctcacatggaaacagaaaacgctgggtcagcagcaagctgtagtttttaaaaatgtttttagttaaacgttgaggagaaaaaaaaaaaaggcttttcccccaaagtatcatgtgtgaacctacaacaccctgacctctttctctcctccttgattgtatgaataaccctgagatcacctcttagaactggttttaacctttagctgcagcggctacgctgccacgtgtgtatatatatgacgttgtacattgcacatacccttggatccccacagtttggtcctcctcccagctacccctttatagtatgacgagttaacaagttggtgacctgcacaaagcgagacacagctatttaatctcttgccagatatcgcccctcttggtgcgatgctgtacaggtctctgtaaaaagtccttgctgtctcagcagccaatcaacttatagtttatttttttctgggtttttgttttgttttgttttctttctaatcgaggtgtgaaaaagttctaggttcagttgaagttctgatgaagaaacacaattgagattttttcagtgataaaatctgcatatttgtatttcaacaatgtagctaaaacttgatgtaaattcctcctttttttccttttttggcttaatgaatatcatttattcagtatgaaatctttatactatatgttccacgtgttaagaataaatgtacattaaatcttggtaagacttt

SEQ ID NO: 120 - DNA, 8585 bp, Homo sapiens
cagaaagcggagagtcacagcggggccaggccctggggagcggagcctccaccgcccccctcattcccaggcaagggcttggggggaatgagccgggagagccgggtcccgagcctacagagccgggagcagctgagccgccggcgcctcggccgccgccgccgcctcctcctcctccgccgccgccagcccggagcctgagccggcggggcgggggggagaggagcgagcgcagcgcagcagcggagccccgcgaggcccgcccgggcgggtggggagggcagcccgggggactgggccccggggcggggtgggagggggggagaagacgaagacagggccgggtctctccgcggacgagacagcggggatcatggccgcgcaggtcgcccccgccgccgccagcagcctgggcaacccgccgccgccgccgccctcggagctgaagaaagccgagcagcagcagcgggaggaggcggggggcgaggcggcggcggcggcagcggccgagcgcggggaaatgaaggcagccgccgggcaggaaagcgagggccccgccgtggggccgccgcagccgctgggaaaggagctgcaggacggggccgagagcaatgggggtggcggcggcggcggagccggcagcggcggcgggcccggcgcggagccggacctgaagaactcgaacgggaacgcgggccctaggcccgccctgaacaataacctcacggagccgcccggcggcggcggtggcggcagcagcgatggggtgggggcgcctcctcactcagccgcggccgccttgccgcccccagcctacggcttcgggcaaccctacggccggagcccgtctgccgtcgccgccgccgcggccgccgtcttccaccaacaacatggcggacaacaaagccctggcctggcagcgctgcagagcggcggcggcgggggcctggagccctacgcggggccccagcagaactctcacgaccacggcttccccaaccaccagtacaactcctactaccccaaccgcagcgcctaccccccgcccgccccggcctacgcgctgagctccccgagaggtggcactccgggctccggcgcggcggcggctgccggctccaagccgcctccctcctccagcgcctccgcctcctcgtcgtcttcgtccttcgctcagcagcgcttcggggccatggggggaggcggcccctccgcggccggcgggggaactccccagcccaccgccacccccaccctcaaccaactgctcacgtcgcccagctcggcccggggctaccagggctaccccgggggcgactacagtggcgggccccaggacgggggcgccggcaagggcccggcggacatggcctcgcagtgttggggggctgcggcggcggcagctgcggcggcggccgcctcgggaggggcccaacaaaggagccaccacgcgcccatgagccccgggagcagcggcggcggggggcagccgctcgcccggacccctcagccatccagtccaatggatcagatgggcaagatgagacctcagccatatggcgggactaacccatactcgcagcaacagggacctccgtcaggaccgcagcaaggacatgggtacccagggcagccatacgggtcccagaccccgcagcggtacccgatgaccatgcagggccgggcgcagagtgccatgggcggcctctcttatacacagcagattcctccttatggacaacaaggccccagcgggtatggtcaacagggccagactccatattacaaccagcaaagtcctcaccctcagcagcagcagccaccctactcccagcaaccaccgtcccagacccctcatgcccaaccttcgtatcagcagcagccacagtctcaaccaccacagctccagtcctctcagcctccatactcccagcagccatcccagcctccacatcagcagtccccggctccatacccctcccagcagtcgacgacacagcagcacccccagagccagcccccctactcacagccacaggctcagtctccttaccagcagcagcaacctcagcagccagcaccctcgacgctctcccagcaggctgcgtatcctcagccccagtctcagcagtcccagcaaactgcctattcccagcagcgcttccctccaccgcaggagctatctcaagattcatttgggtctcaggcatcctcagccccctcaatgacctccagtaagggagggcaagaagatatgaacctgagccttcagtcaagaccctccagcttgcctgatctatctggttcaatagatgacctccccatggggacagaaggagctctgagtcctggagtgagcacatcagggatttccagcagccaaggagagcagagtaatccagctcagtctcctttctctcctcatacctcccctcacctgcctggcatccgaggcccttccccgtcccctgttggctctcccgccagtgttgctcagtctcgctcaggaccactctcgcctgctgcagtgccaggcaaccagatgccacctcggccacccagtggccagtcggacagcatcatgcatccttccatgaaccaatcaagcattgcccaagatcgaggttatatgcagaggaacccccagatgccccagtacagttccccccagcccggctcagccttatctccgcgtcagccttccggaggacagatacacacaggcatgggctcctaccagcagaactccatggggagctatggtccccaggggggtcagtatggcccacaaggtggctaccccaggcagccaaactataatgccttgcccaatgccaactaccccagtgcaggcatggctggaggcataaaccccatgggtgccggaggtcaaatgcatggacagcctggcatcccaccttatggcacactccctccagggaggatgagtcacgcctccatgggcaaccggccttatggccctaacatggccaatatgccacctcaggttgggtcagggatgtgtcccccaccagggggcatgaaccggaaaacccaagaaactgctgtcgccatgcatgttgctgccaactctatccaaaacaggccgccaggctaccccaatatgaatcaagggggcatgatgggaactggacctccttatggacaagggattaatagtatggctggcatgatcaaccctcagggacccccatattccatgggtggaaccatggccaacaattctgcagggatggcagccagcccagagatgatgggccttggggatgtaaagttaactccagccaccaaaatgaacaacaaggcagatgggacacccaagacagaatccaaatccaagaaatccagttcttctactacaaccaatgagaagatcaccaagttgtatgagctgggtggtgagcctgagaggaagatgtgggtggaccgttatctggccttcactgaggagaaggccatgggcatgacaaatctgcctgctgtgggtaggaaacctctggacctctatcgcctctatgtgtctgtgaaggagattggtggattgactcaggtcaacaagaacaaaaaatggcgggaacttgcaaccaacctcaatgtgggcacatcaagcagtgctgccagctccttgaaaaagcagtatatccagtgtctctatgcctttgaatgcaagattgaacggggagaagaccctcccccagacatctttgcagctgctgattccaagaagtcccagcccaagatccagcctccctctcctgcgggatcaggatctatgcaggggccccagactccccagtcaaccagcagttccatggcagaaggaggagacttaaagccaccaactccagcatccacaccacacagtcagatccccccattgccaggcatgagcaggagcaattcagttgggatccaggatgcctttaatgatggaagtgactccacattccagaagcggaattccatgactccaaaccctgggtatcagcccagtatgaatacctctgacatgatggggcgcatgtcctatgagccaaataaggatccttatggcagcatgaggaaagctccagggagtgatcccttcatgtcctcagggcagggccccaacggcgggatgggtgacccctacagtcgtgctgccggccctgggctaggaaatgtggcgatgggaccacgacagcactatccctatggaggtccttatgacagagtgaggacggagcctggaatagggcctgagggaaacatgagcactggggccccacagccgaatctcatgccttccaacccagactcggggatgtattctcctagccgctaccccccgcagcagcagcagcagcagcagcaacgacatgattcctatggcaatcagttctccacccaaggcaccccttctggcagccccttccccagccagcagactacaatgtatcaacagcaacagcagaattacaagcggccaatggatggcacatatggccctcctgccaagcggcacgaaggggagatgtacagcgtgccatacagcactgggcaggggccgcctcagcagcagcagttgcccccagcccagccccagcctgccagccagcaacaagctgcccagccttcccctcagcaagatgtatacaaccagtatggcaatgcctatcctgccactgccacagctgctactgagcgccgaccagcaggcggcccccagaaccaatttccattccagtttggccgagaccgtgtctctgcaccccctggcaccaatgcccagcaaaacatgccaccacaaatgatgggcggccccatacaggcatcagctgaggttgctcagcaaggcaccatgtggcaggggcgtaatgacatgacctataattatgccaacaggcagagcacgggctctgccccccagggccccgcctatcatggcgtgaaccgaacagatgaaatgctgcacacagatcagagggccaaccacgaaggctcgtggccttcccatggcacacgccagcccccatatggtccctctgcccctgtgccccccatgacaaggccccctccatctaactaccagcccccaccaagcatgcagaatcacattcctcaggtatccagccctgctcccctgccccggccaatggagaaccgcacctctcctagcaagtctccattcctgcactctgggatgaaaatgcagaaggcaggtcccccagtacctgcctcgcacatagcacctgcccctgtgcagccccccatgattcggcgggatatcaccttcccacctggctctgttgaagccacacagcctgtgttgaagcagaggaggcggctcacaatgaaagacattggaaccccggaggcatggcgggtaatgatgtccctcaagtctggtctcctggcagagagcacatgggcattagataccatcaacatcctgctgtatgatgacaacagcatcatgaccttcaacctcagtcagctcccagggttgctagagctccttgtagaatatttccgacgatgcctgattgagatctttggcattttaaaggagtatgaggtgggtgacccaggacagagaacgctactggatcctgggaggttcagcaaggtgtctagtccagctcccatggagggtggggaagaagaagaagaacttctaggtcctaaactagaagaggaagaagaagaggaagtagttgaaaatgatgaggagatagccttttcaggcaaggacaagccagcttcagagaatagtgaggagaagctgatcagtaagtttgacaagcttccagtaaagatcgtacagaagaatgatccatttgtggtggactgctcagataagcttgggcgtgtgcaggagtttgacagtggcctgctgcactggcggattggtgggggggacaccactgagcatatccagacccacttcgagagcaagacagagctgctgccttcccggcctcacgcaccctgcccaccagcccctcggaagcatgtgacaacagcagagggtacaccagggacaacagaccaggaggggcccccacctgatggacctccagaaaaacggatcacagccactatggatgacatgttgtctactcggtctagcaccttgaccgaggatggagctaagagttcagaggccatcaaggagagcagcaagtttccatttggcattagcccagcacagagccaccggaacatcaagatcctagaggacgaaccccacagtaaggatgagaccccactgtgtacccttctggactggcaggattctcttgccaagcgctgcgtctgtgtgtccaataccattcgaagcctgtcatttgtgccaggcaatgactttgagatgtccaaacacccagggctgctgctcatcctgggcaagctgatcctgctgcaccacaagcacccagaacggaagcaggcaccactaacttatgaaaaggaggaggaacaggaccaaggggtgagctgcaacaaagtggagtggtggtgggactgcttggagatgctccgggaaaacaccttggttacactcgccaacatctcggggcagttggacctatctccataccccgagagcatttgcctgcctgtcctggacggactcctacactgggcagtttgcccttcagctgaagcccaggaccccttttccaccctgggccccaatgccgtcctttccccgcagagactggtcttggaaaccctcagcaaactcagcatccaggacaacaatgtggacctgattctggccacaccccccttcagccgcctggagaagttgtatagcactatggtgcgcttcctcagtgaccgaaagaacccggtgtgccgggagatggctgtggtactgctggccaacctggctcagggggacagcctggcagctcgtgccattgcagtgcagaagggcagtatcggcaacctcctgggcttcctagaggacagccttgccgccacacagttccagcagagccaggccagcctcctccacatgcagaacccaccctttgagccaactagtgtggacatgatgcggcgggctgcccgcgcgctgcttgccttggccaaggtggacgagaaccactcagagtttactctgtacgaatcacggctgttggacatctcggtatcaccgttgatgaactcattggtttcacaagtcatttgtgatgtactgtttttgattggccagtcatgacagccgtgggacacctcccccccccgtgtgtgtgtgcgtgtgtggagaacttagaaactgactgttgccctttatttatgcaaaaccacctcagaatccagtttaccctgtgctgtccagcttctcccttgggaaaaagtctctcctgtttctctctcctccttccacctcccctccctccatcacctcacgcctttctgttccttgtcctcaccttactcccctcaggaccctaccccaccctctttgaaaagacaaagctctgcctacatagaagactttttttattttaaccaaagttactgttgtttacagtgagtttggggaaaaaaaataaaataaaaatggctttcccagtccttgcatcaacgggatgccacatttcataactgtttttaatggtaaaaaaaaaaaaaaaaaatacaaaaaaaaattctgaaggacaaaaaaggtgactgctgaactgtgtgtggtttattgttgtacattcacaatcttgcaggagccaagaagttcgcagttgtgaacagaccctgttcactggagaggcctgtgcagtagagtgtagaccctttcatgtactgtactgtacacctgatactgtaaacatactgtaataataatgtctcacatggaaacagaaaacgctgggtcagcagcaagctgtagtttttaaaaatgtttttagttaaacgttgaggagaaaaaaaaaaaaggcttttcccccaaagtatcatgtgtgaacctacaacaccctgacctctttctctcctccttgattgtatgaataaccctgagatcacctcttagaactggttttaacctttagctgcagcggctacgctgccacgtgtgtatatatatgacgttgtacattgcacatacccttggatccccacagtttggtcctcctcccagctacccctttatagtatgacgagttaacaagttggtgacctgcacaaagcgagacacagctatttaatctcttgccagatatcgcccctcttggtgcgatgctgtacaggtctctgtaaaaagtccttgctgtctcagcagccaatcaacttatagtttatttttttctgggtttttgttttgttttgttttctttctaatcgaggtgtgaaaaagttctaggttcagttgaagttctgatgaagaaacacaattgagattttttcagtgataaaatctgcatatttgtatttcaacaatgtagctaaaacttgatgtaaattcctcctttttttccttttttggcttaatgaatatcatttattcagtatgaaatctttatactatatgttccacgtgttaagaataaatgtacattaaatcttggtaagacttt

SEQ ID NO: 121 - DNA, 8585 bp, Homo sapiens
cagaaagcggagagtcacagcggggccaggccctggggagcggagcctccaccgcccccctcattcccaggcaagggcttggggggaatgagccgggagagccgggtcccgagcctacagagccgggagcagctgagccgccggcgcctcggccgccgccgccgcctcctcctcctccgccgccgccagcccggagcctgagccggcggggcgggggggagaggagcgagcgcagcgcagcagcggagccccgcgaggcccgcccgggcgggtggggagggcagcccgggggactgggccccggggcggggtgggagggggggagaagacgaagacagggccgggtctctccgcggacgagacagcggggatcatggccgcgcaggtcgcccccgccgccgccagcagcctgggcaacccgccgccgccgccgccctcggagctgaagaaagccgagcagcagcagcgggaggaggcggggggcgaggcggcggcggcggcagcggccgagcgcggggaaatgaaggcagccgccgggcaggaaagcgagggccccgccgtggggccgccgcagccgctgggaaaggagctgcaggacggggccgagagcaatgggggtggcggcggcggcggagccggcagcggcggcgggcccggcgcggagccggacctgaagaactcgaacgggaacgcgggccctaggcccgccctgaacaataacctcacggagccgcccggcggcggcggtggcggcagcagcgatggggtgggggcgcctcctcactcagccgcggccgccttgccgcccccagcctacggcttcgggcaaccctacggccggagcccgtctgccgtcgccgccgccgcggccgccgtcttccaccaacaacatggcggacaacaaagccctggcctggcagcgctgcagagcggcggcggcgggggcctggagctctacgcggggccccagcagaactctcacgaccacggcttccccaaccaccagtacaactcctactaccccaaccgcagcgcctaccccccgcccgccccggcctacgcgctgagctccccgagaggtggcactccgggctccggcgcggcggcggctgccggctccaagccgcctccctcctccagcgcctccgcctcctcgtcgtcttcgtccttcgctcagcagcgcttcggggccatggggggaggcggcccctccgcggccggcgggggaactccccagcccaccgccacccccaccctcaaccaactgctcacgtcgcccagctcggcccggggctaccagggctaccccgggggcgactacagtggcgggccccaggacgggggcgccggcaagggcccggcggacatggcctcgcagtgttggggggctgcggcggcggcagctgcggcggcggccgcctcgggaggggcccaacaaaggagccaccacgcgcccatgagccccgggagcagcggcggcggggggcagccgctcgcccggacccctcagccatccagtccaatggatcagatgggcaagatgagacctcagccatatggcgggactaacccatactcgcagcaacagggacctccgtcaggaccgcagcaaggacatgggtacccagggcagccatacgggtcccagaccccgcagcggtacccgatgaccatgcagggccgggcgcagagtgccatgggcggcctctcttatacacagcagattcctccttatggacaacaaggccccagcgggtatggtcaacagggccagactccatattacaaccagcaaagtcctcaccctcagcagcagcagccaccctactcccagcaaccaccgtcccagacccctcatgcccaaccttcgtatcagcagcagccacagtctcaaccaccacagctccagtcctctcagcctccatactcccagcagccatcccagcctccacatcagcagtccccggctccatacccctcccagcagtcgacgacacagcagcacccccagagccagcccccctactcacagccacaggctcagtctccttaccagcagcagcaacctcagcagccagcaccctcgacgctctcccagcaggctgcgtatcctcagccccagtctcagcagtcccagcaaactgcctattcccagcagcgcttccctccaccgcaggagctatctcaagattcatttgggtctcaggcatcctcagccccctcaatgacctccagtaagggagggcaagaagatatgaacctgagccttcagtcaagaccctccagcttgcctgatctatctggttcaatagatgacctccccatggggacagaaggagctctgagtcctggagtgagcacatcagggatttccagcagccaaggagagcagagtaatccagctcagtctcctttctctcctcatacctcccctcacctgcctggcatccgaggcccttccccgtcccctgttggctctcccgccagtgttgctcagtctcgctcaggaccactctcgcctgctgcagtgccaggcaaccagatgccacctcggccacccagtggccagtcggacagcatcatgcatccttccatgaaccaatcaagcattgcccaagatcgaggttatatgcagaggaacccccagatgccccagtacagttccccccagcccggctcagccttatctccgcgtcagccttccggaggacagatacacacaggcatgggctcctaccagcagaactccatggggagctatggtccccaggggggtcagtatggcccacaaggtggctaccccaggcagccaaactataatgccttgcccaatgccaactaccccagtgcaggcatggctggaggcataaaccccatgggtgccggaggtcaaatgcatggacagcctggcatcccaccttatggcacactccctccagggaggatgagtcacgcctccatgggcaaccggccttatggccctaacatggccaatatgccacctcaggttgggtcagggatgtgtcccccaccagggggcatgaaccggaaaacccaagaaactgctgtcgccatgcatgttgctgccaactctatccaaaacaggccgccaggctaccccaatatgaatcaagggggcatgatgggaactggacctccttatggacaagggattaatagtatggctggcatgatcaaccctcagggacccccatattccatgggtggaaccatggccaacaattctgcagggatggcagccagcccagagatgatgggccttggggatgtaaagttaactccagccaccaaaatgaacaacaaggcagatgggacacccaagacagaatccaaatccaagaaatccagttcttctactacaaccaatgagaagatcaccaagttgtatgagctgggtggtgagcctgagaggaagatgtgggtggaccgttatctggccttcactgaggagaaggccatgggcatgacaaatctgcctgctgtgggtaggaaacctctggacctctatcgcctctatgtgtctgtgaaggagattggtggattgactcaggtcaacaagaacaaaaaatggcgggaacttgcaaccaacctcaatgtgggcacatcaagcagtgctgccagctccttgaaaaagcagtatatccagtgtctctatgcctttgaatgcaagattgaacggggagaagaccctcccccagacatctttgcagctgctgattccaagaagtcccagcccaagatccagcctccctctcctgcgggatcaggatctatgcaggggccccagactccccagtcaaccagcagttccatggcagaaggaggagacttaaagccaccaactccagcatccacaccacacagtcagatccccccattgccaggcatgagcaggagcaattcagttgggatccaggatgcctttaatgatggaagtgactccacattccagaagcggaattccatgactccaaaccctgggtatcagcccagtatgaatacctctgacatgatggggcgcatgtcctatgagccaaataaggatccttatggcagcatgaggaaagctccagggagtgatcccttcatgtcctcagggcagggccccaacggcgggatgggtgacccctacagtcgtgctgccggccctgggctaggaaatgtggcgatgggaccacgacagcactatccctatggaggtccttatgacagagtgaggacggagcctggaatagggcctgagggaaacatgagcactggggccccacagccgaatctcatgccttccaacccagactcggggatgtattctcctagccgctaccccccgcagcagcagcagcagcagcagcaacgacatgattcctatggcaatcagttctccacccaaggcaccccttctggcagccccttccccagccagcagactacaatgtatcaacagcaacagcagaattacaagcggccaatggatggcacatatggccctcctgccaagcggcacgaaggggagatgtacagcgtgccatacagcactgggcaggggcagcctcagcagcagcagttgcccccagcccagccccagcctgccagccagcaacaagctgcccagccttcccctcagcaagatgtatacaaccagtatggcaatgcctatcctgccactgccacagctgctactgagcgccgaccagcaggcggcccccagaaccaatttccattccagtttggccgagaccgtgtctctgcaccccctggcaccaatgcccagcaaaacatgccaccacaaatgatgggcggccccatacaggcatcagctgaggttgctcagcaaggcaccatgtggcaggggcgtaatgacatgacctataattatgccaacaggcagagcacgggctctgccccccagggccccgcctatcatggcgtgaaccgaacagatgaaatgctgcacacagatcagagggccaaccacgaaggctcgtggccttcccatggcacacgccagcccccatatggtccctctgcccctgtgccccccatgacaaggccccctccatctaactaccagcccccaccaagcatgcagaatcacattcctcaggtatccagccctgctcccctgccccggccaatggagaaccgcacctctcctagcaagtctccattcctgcactctgggatgaaaatgcagaaggcaggtcccccagtacctgcctcgcacatagcacctgcccctgtgcagccccccatgattcggcgggatatcaccttcccacctggctctgttgaagccacacagcctgtgttgaagcagaggaggcggctcacaatgaaagacattggaaccccggaggcatggcgggtaatgatgtccctcaagtctggtctcctggcagagagcacatgggcattagataccatcaacatcctgctgtatgatgacaacagcatcatgaccttcaacctcagtcagctcccagggttgctagagctccttgtagaatatttccgacgatgcctgattgagatctttggcattttaaaggagtatgaggtgggtgacccaggacagagaacgctactggatcctgggaggttcagcaaggtgtctagtccagctcccatggagggtggggaagaagaagaagaacttctaggtcctaaactagaagaggaagaagaagaggaagtagttgaaaatgatgaggagatagccttttcaggcaaggacaagccagcttcagagaatagtgaggagaagctgatcagtaagtttgacaagcttccagtaaagatcgtacagaagaatgatccatttgtggtggactgctcagataagcttgggcgtgtgcaggagtttgacagtggcctgctgcactggcggattggtgggggggacaccactgagcatatccagacccacttcgagagcaagacagagctgctgccttcccggcctcacgcaccctgcccaccagcccctcggaagcatgtgacaacagcagagggtacaccagggacaacagaccaggaggggcccccacctgatggacctccagaaaaacggatcacagccactatggatgacatgttgtctactcggtctagcaccttgaccgaggatggagctaagagttcagaggccatcaaggagagcagcaagtttccatttggcattagcccagcacagagccaccggaacatcaagatcctagaggacgaaccccacagtaaggatgagaccccactgtgtacccttctggactggcaggattctcttgccaagcgctgcgtctgtgtgtccaataccattcgaagcctgtcatttgtgccaggcaatgactttgagatgtccaaacacccagggctgctgctcatcctgggcaagctgatcctgctgcaccacaagcacccagaacggaagcaggcaccactaacttatgaaaaggaggaggaacaggaccaaggggtgagctgcaacaaagtggagtggtggtgggactgcttggagatgctccgggaaaacaccttggttacactcgccaacatctcggggcagttggacctatctccataccccgagagcatttgcctgcctgtcctggacggactcctacactgggcagtttgcccttcagctgaagcccaggaccccttttccaccctgggccccaatgccgtcctttccccgcagagactggtcttggaaaccctcagcaaactcagcatccaggacaacaatgtggacctgattctggccacaccccccttcagccgcctggagaagttgtatagcactatggtgcgcttcctcagtgaccgaaagaacccggtgtgccgggagatggctgtggtactgctggccaacctggctcagggggacagcctggcagctcgtgccattgcagtgcagaagggcagtatcggcaacctcctgggcttcctagaggacagccttgccgccacacagttccagcagagccaggccagcctcctccacatgcagaacccaccctttgagccaactagtgtggacatgatgcggcgggctgcccgcgcgctgcttgccttggccaaggtggacgagaaccactcagagtttactctgtacgaatcacggctgttggacatctcggtatcaccgttgatgaactcattggtttcacaagtcatttgtgatgtactgtttttgattggccagtcatgacagccgtgggacacctcccccccccgtgtgtgtgtgcgtgtgtggagaacttagaaactgactgttgccctttatttatgcaaaaccacctcagaatccagtttaccctgtgctgtccagcttctcccttgggaaaaagtctctcctgtttctctctcctccttccacctcccctccctccatcacctcacgcctttctgttccttgtcctcaccttactcccctcaggaccctaccccaccctctttgaaaagacaaagctctgcctacatagaagactttttttattttaaccaaagttactgttgtttacagtgagtttggggaaaaaaaataaaataaaaatggctttcccagtccttgcatcaacgggatgccacatttcataactgtttttaatggtaaaaaaaaaaaaaaaaaatacaaaaaaaaattctgaaggacaaaaaaggtgactgctgaactgtgtgtggtttattgttgtacattcacaatcttgcaggagccaagaagttcgcagttgtgaacagaccctgttcactggagaggcctgtgcagtagagtgtagaccctttcatgtactgtactgtacacctgatactgtaaacatactgtaataataatgtctcacatggaaacagaaaacgctgggtcagcagcaagctgtagtttttaaaaatgtttttagttaaacgttgaggagaaaaaaaaaaaaggcttttcccccaaagtatcatgtgtgaacctacaacaccctgacctctttctctcctccttgattgtatgaataaccctgagatcacctcttagaactggttttaacctttagctgcagcggctacgctgccacgtgtgtatatatatgacgttgtacattgcacatacccttggatccccacagtttggtcctcctcccagctacccctttatagtatgacgagttaacaagttggtgacctgcacaaagcgagacacagctatttaatctcttgccagatatcgcccctcttggtgcgatgctgtacaggtctctgtaaaaagtccttgctgtctcagcagccaatcaacttatagtttatttttttctgggtttttgttttgttttgttttctttctaatcgaggtgtgaaaaagttctaggttcagttgaagttctgatgaagaaacacaattgagattttttcagtgataaaatctgcatatttgtatttcaacaatgtagctaaaacttgatgtaaattcctcctttttttccttttttggcttaatgaatatcatttattcagtatgaaatctttatactatatgttccacgtgttaagaataaatgtacattaaatcttggtaagacttt

SEQ ID NO: 122 - DNA, 8585 bp, Homo sapiens
cagaaagcggagagtcacagcggggccaggccctggggagcggagcctccaccgcccccctcattcccaggcaagggcttggggggaatgagccgggagagccgggtcccgagcctacagagccgggagcagctgagccgccggcgcctcggccgccgccgccgcctcctcctcctccgccgccgccagcccggagcctgagccggcggggcgggggggagaggagcgagcgcagcgcagcagcggagccccgcgaggcccgcccgggcgggtggggagggcagcccgggggactgggccccggggcggggtgggagggggggagaagacgaagacagggccgggtctctccgcggacgagacagcggggatcatggccgcgcaggtcgcccccgccgccgccagcagcctgggcaacccgccgccgccgccgccctcggagctgaagaaagccgagcagcagcagcgggaggaggcggggggcgaggcggcggcggcggcagcggccgagcgcggggaaatgaaggcagccgccgggcaggaaagcgagggccccgccgtggggccgccgcagccgctgggaaaggagctgcaggacgggaccgagagcaatgggggtggcggcggcggcggagccggcagcggcggcgggcccggcgcggagccggacctgaagaactcgaacgggaacgcgggccctaggcccgccctgaacaataacctcacggagccgcccggcggcggcggtggcggcagcagcgatggggtgggggcgcctcctcactcagccgcggccgccttgccgcccccagcctacggcttcgggcaaccctacggccggagcccgtctgccgtcgccgccgccgcggccgccgtcttccaccaacaacatggcggacaacaaagccctggcctggcagcgctgcagagcggcggcggcgggggcctggagccctacgcggggccccagcagaactctcacgaccacggcttccccaaccaccagtacaactcctactaccccaaccgcagcgcctaccccccgcccgccccggcctacgcgctgagctccccgagaggtggcactccgggctccggcgcggcggcggctgccggctccaagccgcctccctcctccagcgcctccgcctcctcgtcgtcttcgtccttcgctcagcagcgcttcggggccatggggggaggcggcccctccgcggccggcgggggaactccccagcccaccgccacccccaccctcaaccaactgctcacgtcgcccagctcggcccggggctaccagggctaccccgggggcgactacagtggcgggccccaggacgggggcgccggcaagggcccggcggacatggcctcgcagtgttggggggctgcggcggcggcagctgcggcggcggccgcctcgggaggggcccaacaaaggagccaccacgcgcccatgagccccgggagcagcggcggcggggggcagccgctcgcccggacccctcagccatccagtccaatggatcagatgggcaagatgagacctcagccatatggcgggactaacccatactcgcagcaacagggacctccgtcaggaccgcagcaaggacatgggtacccagggcagccatacgggtcccagaccccgcagcggtacccgatgaccatgcagggccgggcgcagagtgccatgggcggcctctcttatacacagcagattcctccttatggacaacaaggccccagcgggtatggtcaacagggccagactccatattacaaccagcaaagtcctcaccctcagcagcagcagccaccctactcccagcaaccaccgtcccagacccctcatgcccaaccttcgtatcagcagcagccacagtctcaaccaccacagctccagtcctctcagcctccatactcccagcagccatcccagcctccacatcagcagtccccggctccatacccctcccagcagtcgacgacacagcagcacccccagagccagcccccctactcacagccacaggctcagtctccttaccagcagcagcaacctcagcagccagcaccctcgacgctctcccagcaggctgcgtatcctcagccccagtctcagcagtcccagcaaactgcctattcccagcagcgcttccctccaccgcaggagctatctcaagattcatttgggtctcaggcatcctcagccccctcaatgacctccagtaagggagggcaagaagatatgaacctgagccttcagtcaagaccctccagcttgcctgatctatctggttcaatagatgacctccccatggggacagaaggagctctgagtcctggagtgagcacatcagggatttccagcagccaaggagagcagagtaatccagctcagtctcctttctctcctcatacctcccctcacctgcctggcatccgaggcccttccccgtcccctgttggctctcccgccagtgttgctcagtctcgctcaggaccactctcgcctgctgcagtgccaggcaaccagatgccacctcggccacccagtggccagtcggacagcatcatgcatccttccatgaaccaatcaagcattgcccaagatcgaggttatatgcagaggaacccccagatgccccagtacagttccccccagcccggctcagccttatctccgcgtcagccttccggaggacagatacacacaggcatgggctcctaccagcagaactccatggggagctatggtccccaggggggtcagtatggcccacaaggtggctaccccaggcagccaaactataatgccttgcccaatgccaactaccccagtgcaggcatggctggaggcataaaccccatgggtgccggaggtcaaatgcatggacagcctggcatcccaccttatggcacactccctccagggaggatgagtcacgcctccatgggcaaccggccttatggccctaacatggccaatatgccacctcaggttgggtcagggatgtgtcccccaccagggggcatgaaccggaaaacccaagaaactgctgtcgccatgcatgttgctgccaactctatccaaaacaggccgccaggctaccccaatatgaatcaagggggcatgatgggaactggacctccttatggacaagggattaatagtatggctggcatgatcaaccctcagggacccccatattccatgggtggaaccatggccaacaattctgcagggatggcagccagcccagagatgatgggccttggggatgtaaagttaactccagccaccaaaatgaacaacaaggcagatgggacacccaagacagaatccaaatccaagaaatccagttcttctactacaaccaatgagaagatcaccaagttgtatgagctgggtggtgagcctgagaggaagatgtgggtggaccgttatctggccttcactgaggagaaggccatgggcatgacaaatctgcctgctgtgggtaggaaacctctggacctctatcgcctctatgtgtctgtgaaggagattggtggattgactcaggtcaacaagaacaaaaaatggcgggaacttgcaaccaacctcaatgtgggcacatcaagcagtgctgccagctccttgaaaaagcagtatatccagtgtctctatgcctttgaatgcaagattgaacggggagaagaccctcccccagacatctttgcagctgctgattccaagaagtcccagcccaagatccagcctccctctcctgcgggatcaggatctatgcaggggccccagactccccagtcaaccagcagttccatggcagaaggaggagacttaaagccaccaactccagcatccacaccacacagtcagatccccccattgccaggcatgagcaggagcaattcagttgggatccaggatgcctttaatgatggaagtgactccacattccagaagcggaattccatgactccaaaccctgggtatcagcccagtatgaatacctctgacatgatggggcgcatgtcctatgagccaaataaggatccttatggcagcatgaggaaagctccagggagtgatcccttcatgtcctcagggcagggccccaacggcgggatgggtgacccctacagtcgtgctgccggccctgggctaggaaatgtggcgatgggaccacgacagcactatccctatggaggtccttatgacagagtgaggacggagcctggaatagggcctgagggaaacatgagcactggggccccacagccgaatctcatgccttccaacccagactcggggatgtattctcctagccgctaccccccgcagcagcagcagcagcagcagcaacgacatgattcctatggcaatcagttctccacccaaggcaccccttctggcagccccttccccagccagcagactacaatgtatcaacagcaacagcagaattacaagcggccaatggatggcacatatggccctcctgccaagcggcacgaaggggagatgtacagcgtgccatacagcactgggcaggggcagcctcagcagcagcagttgcccccagcccagccccagcctgccagccagcaacaagctgcccagccttcccctcagcaagatgtatacaaccagtatggcaatgcctatcctgccactgccacagctgctactgagcgccgaccagcaggcggcccccagaaccaatttccattccagtttggccgagaccgtgtctctgcaccccctggcaccaatgcccagcaaaacatgccaccacaaatgatgggcggccccatacaggcatcagctgaggttgctcagcaaggcaccatgtggcaggggcgtaatgacatgacctataattatgccaacaggcagagcacgggctctgccccccagggccccgcctatcatggcgtgaaccgaacagatgaaatgctgcacacagatcagagggccaaccacgaaggctcgtggccttcccatggcacacgccagcccccatatggtccctctgcccctgtgccccccatgacaaggccccctccatctaactaccagcccccaccaagcatgcagaatcacattcctcaggtatccagccctgctcccctgccccggccaatggagaaccgcacctctcctagcaagtctccattcctgcactctgggatgaaaatgcagaaggcaggtcccccagtacctgcctcgcacatagcacctgcccctgtgcagccccccatgattcggcgggatatcaccttcccacctggctctgttgaagccacacagcctgtgttgaagcagaggaggcggctcacaatgaaagacattggaaccccggaggcatggcgggtaatgatgtccctcaagtctggtctcctggcagagagcacatgggcattagataccatcaacatcctgctgtatgatgacaacagcatcatgaccttcaacctcagtcagctcccagggttgctagagctccttgtagaatatttccgacgatgcctgattgagatctttggcattttaaaggagtatgaggtgggtgacccaggacagagaacgctactggatcctgggaggttcagcaaggtgtctagtccagctcccatggagggtggggaagaagaagaagaacttctaggtcctaaactagaagaggaagaagaagaggaagtagttgaaaatgatgaggagatagccttttcaggcaaggacaagccagcttcagagaatagtgaggagaagctgatcagtaagtttgacaagcttccagtaaagatcgtacagaagaatgatccatttgtggtggactgctcagataagcttgggcgtgtgcaggagtttgacagtggcctgctgcactggcggattggtgggggggacaccactgagcatatccagacccacttcgagagcaagacagagctgctgccttcccggcctcacgcaccctgcccaccagcccctcggaagcatgtgacaacagcagagggtacaccagggacaacagaccaggaggggcccccacctgatggacctccagaaaaacggatcacagccactatggatgacatgttgtctactcggtctagcaccttgaccgaggatggagctaagagttcagaggccatcaaggagagcagcaagtttccatttggcattagcccagcacagagccaccggaacatcaagatcctagaggacgaaccccacagtaaggatgagaccccactgtgtacccttctggactggcaggattctcttgccaagcgctgcgtctgtgtgtccaataccattcgaagcctgtcatttgtgccaggcaatgactttgagatgtccaaacacccagggctgctgctcatcctgggcaagctgatcctgctgcaccacaagcacccagaacggaagcaggcaccactaacttatgaaaaggaggaggaacaggaccaaggggtgagctgcaacaaagtggagtggtggtgggactgcttggagatgctccgggaaaacaccttggttacactcgccaacatctcggggcagttggacctatctccataccccgagagcatttgcctgcctgtcctggacggactcctacactgggcagtttgcccttcagctgaagcccaggaccccttttccaccctgggccccaatgccgtcctttccccgcagagactggtcttggaaaccctcagcaaactcagcatccaggacaacaatgtggacctgattctggccacaccccccttcagccgcctggagaagttgtatagcactatggtgcgcttcctcagtgaccgaaagaacccggtgtgccgggagatggctgtggtactgctggccaacctggctcagggggacagcctggcagctcgtgccattgcagtgcagaagggcagtatcggcaacctcctgggcttcctagaggacagccttgccgccacacagttccagcagagccaggccagcctcctccacatgcagaacccaccctttgagccaactagtgtggacatgatgcggcgggctgcccgcgcgctgcttgccttggccaaggtggacgagaaccactcagagtttactctgtacgaatcacggctgttggacatctcggtatcaccgttgatgaactcattggtttcacaagtcatttgtgatgtactgtttttgattggccagtcatgacagccgtgggacacctcccccccccgtgtgtgtgtgcgtgtgtggagaacttagaaactgactgttgccctttatttatgcaaaaccacctcagaatccagtttaccctgtgctgtccagcttctcccttgggaaaaagtctctcctgtttctctctcctccttccacctcccctccctccatcacctcacgcctttctgttccttgtcctcaccttactcccctcaggaccctaccccaccctctttgaaaagacaaagctctgcctacatagaagactttttttattttaaccaaagttactgttgtttacagtgagtttggggaaaaaaaataaaataaaaatggctttcccagtccttgcatcaacgggatgccacatttcataactgtttttaatggtaaaaaaaaaaaaaaaaaatacaaaaaaaaattctgaaggacaaaaaaggtgactgctgaactgtgtgtggtttattgttgtacattcacaatcttgcaggagccaagaagttcgcagttgtgaacagaccctgttcactggagaggcctgtgcagtagagtgtagaccctttcatgtactgtactgtacacctgatactgtaaacatactgtaataataatgtctcacatggaaacagaaaacgctgggtcagcagcaagctgtagtttttaaaaatgtttttagttaaacgttgaggagaaaaaaaaaaaaggcttttcccccaaagtatcatgtgtgaacctacaacaccctgacctctttctctcctccttgattgtatgaataaccctgagatcacctcttagaactggttttaacctttagctgcagcggctacgctgccacgtgtgtatatatatgacgttgtacattgcacatacccttggatccccacagtttggtcctcctcccagctacccctttatagtatgacgagttaacaagttggtgacctgcacaaagcgagacacagctatttaatctcttgccagatatcgcccctcttggtgcgatgctgtacaggtctctgtaaaaagtccttgctgtctcagcagccaatcaacttatagtttatttttttctgggtttttgttttgttttgttttctttctaatcgaggtgtgaaaaagttctaggttcagttgaagttctgatgaagaaacacaattgagattttttcagtgataaaatctgcatatttgtatttcaacaatgtagctaaaacttgatgtaaattcctcctttttttccttttttggcttaatgaatatcatttattcagtatgaaatctttatactatatgttccacgtgttaagaataaatgtacattaaatcttggtaagacttt

SEQ ID NO: 123 - DNA, 3724 bp, Homo sapiens
tctccctcggcgccgccgccgccgcccgcggggctgggacccgatgcggttagagccgcggagcctggaagagccccgagcgtttctgctttgggacaaccatacatctaattccttaaagtagttttatatgtaaaacttgcaaagaatcagaacaatgcctccacgaccatcatcaggtgaactgtggggcatccacttgatgcccccaagaatcctagtagaatgtttactaccaaatggaatgatagtgactttagaatgcctccgtgaggctacattaataaccataaagcatgaactatttaaagaagcaagaaaataccccctccatcaacttcttcaagatgaatcttcttacattttcgtaagtgttactcaagaagcagaaagggaagaattttttgatgaaacaagacgactttgtgaccttcggctttttcaaccctttttaaaagtaattgaaccagtaggcaaccgtgaagaaaagatcctcaatcgagaaattggttttgctatcggcatgccagtgtgtgaatttgatatggttaaagatccagaagtacaggacttccgaagaaatattctgaacgtttgtaaagaagctgtggatcttagggacctcaattcacctcatagtagagcaatgtatgtctatcctccaaatgtagaatcttcaccagaattgccaaagcacatatataataaattagataaagggcaaataatagtggtgatctgggtaatagtttctccaaataatgacaagcagaagtatactctgaaaatcaaccatgactgtgtaccagaacaagtaattgctgaagcaatcaggaaaaaaactcgaagtatgttgctatcctctgaacaactaaaactctgtgttttagaatatcagggcaagtatattttaaaagtgtgtggatgtgatgaatacttcctagaaaaatatcctctgagtcagtataagtatataagaagctgtataatgcttgggaggatgcccaatttgatgttgatggctaaagaaagcctttattctcaactgccaatggactgttttacaatgccatcttattccagacgcatttccacagctacaccatatatgaatggagaaacatctacaaaatccctttgggttataaatagtgcactcagaataaaaattctttgtgcaacctacgtgaatgtaaatattcgagacattgataagatctatgttcgaacaggtatctaccatggaggagaacccttatgtgacaatgtgaacactcaaagagtaccttgttccaatcccaggtggaatgaatggctgaattatgatatatacattcctgatcttcctcgtgctgctcgactttgcctttccatttgctctgttaaaggccgaaagggtgctaaagaggaacactgtccattggcatggggaaatataaacttgtttgattacacagacactctagtatctggaaaaatggctttgaatctttggccagtacctcatggattagaagatttgctgaaccctattggtgttactggatcaaatccaaataaagaaactccatgcttagagttggagtttgactggttcagcagtgtggtaaagttcccagatatgtcagtgattgaagagcatgccaattggtctgtatcccgagaagcaggatttagctattcccacgcaggactgagtaacagactagctagagacaatgaattaagggaaaatgacaaagaacagctcaaagcaatttctacacgagatcctctctctgaaatcactgagcaggagaaagattttctatggagtcacagacactattgtgtaactatccccgaaattctacccaaattgcttctgtctgttaaatggaattctagagatgaagtagcccagatgtattgcttggtaaaagattggcctccaatcaaacctgaacaggctatggaacttctggactgtaattacccagatcctatggttcgaggttttgctgttcggtgcttggaaaaatatttaacagatgacaaactttctcagtatttaattcagctagtacaggtcctaaaatatgaacaatatttggataacttgcttgtgagatttttactgaagaaagcattgactaatcaaaggattgggcactttttcttttggcatttaaaatctgagatgcacaataaaacagttagccagaggtttggcctgcttttggagtcctattgtcgtgcatgtgggatgtatttgaagcacctgaataggcaagtcgaggcaatggaaaagctcattaacttaactgacattctcaaacaggagaagaaggatgaaacacaaaaggtacagatgaagtttttagttgagcaaatgaggcgaccagatttcatggatgctctacagggctttctgtctcctctaaaccctgctcatcaactaggaaacctcaggcttgaagagtgtcgaattatgtcctctgcaaaaaggccactgtggttgaattgggagaacccagacatcatgtcagagttactgtttcagaacaatgagatcatctttaaaaatggggatgatttacggcaagatatgctaacacttcaaattattcgtattatggaaaatatctggcaaaatcaaggtcttgatcttcgaatgttaccttatggttgtctgtcaatcggtgactgtgtgggacttattgaggtggtgcgaaattctcacactattatgcaaattcagtgcaaaggcggcttgaaaggtgcactgcagttcaacagccacacactacatcagtggctcaaagacaagaacaaaggagaaatatatgatgcagccattgacctgtttacacgttcatgtgctggatactgtgtagctaccttcattttgggaattggagatcgtcacaatagtaacatcatggtgaaagacgatggacaactgtttcatatagattttggacactttttggatcacaagaagaaaaaatttggttataaacgagaacgtgtgccatttgttttgacacaggatttcttaatagtgattagtaaaggagcccaagaatgcacaaagacaagagaatttgagaggtttcaggagatgtgttacaaggcttatctagctattcgacagcatgccaatctcttcataaatcttttctcaatgatgcttggctctggaatgccagaactacaatcttttgatgacattgcatacattcgaaagaccctagccttagataaaactgagcaagaggctttggagtatttcatgaaacaaatgaatgatgcatatcatggtggctggacaacaaaaatggattggatcttccacacaattaaacagcatgcattgaactgaaaagataactgagaaaatgaaagctcactctggattccacactgcactgttaataactctcagcaggcaaagaccgattgcataggaattgcacaatccatgaacagcattagaatttacagcaagaacagaaataaaatactatataatttaaataatgtaaacgcaaacagggtttgatagcacttaaactagttcatttcaaaattaagctttagaataatgcgcaatttcatgttatgccttaagtccaaaaaggtaaactttgaagattgtttgtatctttttttaaaaaacaaaacaaaacaaaaatccccaaaatatatagaaatgatggagaaggaaaaaaaaaaaaaaaaa

SEQ ID NO: 124 - DNA, 5312 bp, Homo sapiens
ggccgcggcggcggaggcagcagcggcggcggcagtggcggcggcgaaggtggcggcggctcggccagtactcccggcccccgccatttcggactgggagcgagcgcggcgcaggcactgaaggcggcggcggggccagaggctcagcggctcccaggtgcgggagagaggcctgctgaaaatgactgaatataaacttgtggtagttggagctggttgcgtaggcaagagtgccttgacgatacagctaattcagaatcattttgtggacgaatatgatccaacaatagaggattcctacaggaagcaagtagtaattgatggagaaacctgtctcttggatattctcgacacagcaggtcaagaggagtacagtgcaatgagggaccagtacatgaggactggggagggctttctttgtgtatttgccataaataatactaaatcatttgaagatattcaccattatagagaacaaattaaaagagttaaggactctgaagatgtacctatggtcctagtaggaaataaatgtgatttgccttctagaacagtagacacaaaacaggctcaggacttagcaagaagttatggaattccttttattgaaacatcagcaaagacaagacagggtgttgatgatgccttctatacattagttcgagaaattcgaaaacataaagaaaagatgagcaaagatggtaaaaagaagaaaaagaagtcaaagacaaagtgtgtaattatgtaaatacaatttgtacttttttcttaaggcatactagtacaagtggtaatttttgtacattacactaaattattagcatttgttttagcattacctaatttttttcctgctccatgcagactgttagcttttaccttaaatgcttattttaaaatgacagtggaagtttttttttcctctaagtgccagtattcccagagttttggtttttgaactagcaatgcctgtgaaaaagaaactgaatacctaagatttctgtcttggggtttttggtgcatgcagttgattacttcttatttttcttaccaattgtgaatgttggtgtgaaacaaattaatgaagcttttgaatcatccctattctgtgttttatctagtcacataaatggattaattactaatttcagttgagaccttctaattggtttttactgaaacattgagggaacacaaatttatgggcttcctgatgatgattcttctaggcatcatgtcctatagtttgtcatccctgatgaatgtaaagttacactgttcacaaaggttttgtctcctttccactgctattagtcatggtcactctccccaaaatattatattttttctataaaaagaaaaaaatggaaaaaaattacaaggcaatggaaactattataaggccatttccttttcacattagataaattactataaagactcctaatagcttttcctgttaaggcagacccagtatgaaatggggattattatagcaaccattttggggctatatttacatgctactaaatttttataataattgaaaagattttaacaagtataaaaaattctcataggaattaaatgtagtctccctgtgtcagactgctctttcatagtataactttaaatcttttcttcaacttgagtctttgaagatagttttaattctgcttgtgacattaaaagattatttgggccagttatagcttattaggtgttgaagagaccaaggttgcaaggccaggccctgtgtgaacctttgagctttcatagagagtttcacagcatggactgtgtccccacggtcatccagtgttgtcatgcattggttagtcaaaatggggagggactagggcagtttggatagctcaacaagatacaatctcactctgtggtggtcctgctgacaaatcaagagcattgcttttgtttcttaagaaaacaaactcttttttaaaaattacttttaaatattaactcaaaagttgagattttggggtggtggtgtgccaagacattaattttttttttaaacaatgaagtgaaaaagttttacaatctctaggtttggctagttctcttaacactggttaaattaacattgcataaacacttttcaagtctgatccatatttaataatgctttaaaataaaaataaaaacaatccttttgataaatttaaaatgttacttattttaaaataaatgaagtgagatggcatggtgaggtgaaagtatcactggactaggaagaaggtgacttaggttctagataggtgtcttttaggactctgattttgaggacatcacttactatccatttcttcatgttaaaagaagtcatctcaaactcttagttttttttttttacaactatgtaatttatattccatttacataaggatacacttatttgtcaagctcagcacaatctgtaaatttttaacctatgttacaccatcttcagtgccagtcttgggcaaaattgtgcaagaggtgaagtttatatttgaatatccattctcgttttaggactcttcttccatattagtgtcatcttgcctccctaccttccacatgccccatgacttgatgcagttttaatacttgtaattcccctaaccataagatttactgctgctgtggatatctccatgaagttttcccactgagtcacatcagaaatgccctacatcttatttcctcagggctcaagagaatctgacagataccataaagggatttgacctaatcactaattttcaggtggtggctgatgctttgaacatctctttgctgcccaatccattagcgacagtaggatttttcaaacctggtatgaatagacagaaccctatccagtggaaggagaatttaataaagatagtgctgaaagaattccttaggtaatctataactaggactactcctggtaacagtaatacattccattgttttagtaaccagaaatcttcatgcaatgaaaaatactttaattcatgaagcttactttttttttttggtgtcagagtctcgctcttgtcacccaggctggaatgcagtggcgccatctcagctcactgcaacctccatctcccaggttcaagcgattctcgtgcctcggcctcctgagtagctgggattacaggcgtgtgccactacactcaactaatttttgtatttttaggagagacggggtttcaccctgttggccaggctggtctcgaactcctgacctcaagtgattcacccaccttggcctcataaacctgttttgcagaactcatttattcagcaaatatttattgagtgcctaccagatgccagtcaccgcacaaggcactgggtatatggtatccccaaacaagagacataatcccggtccttaggtagtgctagtgtggtctgtaatatcttactaaggcctttggtatacgacccagagataacacgatgcgtattttagttttgcaaagaaggggtttggtctctgtgccagctctataattgttttgctacgattccactgaaactcttcgatcaagctactttatgtaaatcacttcattgttttaaaggaataaacttgattatattgtttttttatttggcataactgtgattcttttaggacaattactgtacacattaaggtgtatgtcagatattcatattgacccaaatgtgtaatattccagttttctctgcataagtaattaaaatatacttaaaaattaatagttttatctgggtacaaataaacaggtgcctgaactagttcacagacaaggaaacttctatgtaaaaatcactatgatttctgaattgctatgtgaaactacagatctttggaacactgtttaggtagggtgttaagacttacacagtacctcgtttctacacagagaaagaaatggccatacttcaggaactgcagtgcttatgaggggatatttaggcctcttgaatttttgatgtagatgggcatttttttaaggtagtggttaattacctttatgtgaactttgaatggtttaacaaaagatttgtttttgtagagattttaaagggggagaattctagaaataaatgttacctaattattacagccttaaagacaaaaatccttgttgaagtttttttaaaaaaagctaaattacatagacttaggcattaacatgtttgtggaagaatatagcagacgtatattgtatcatttgagtgaatgttcccaagtaggcattctaggctctatttaactgagtcacactgcataggaatttagaacctaacttttataggttatcaaaactgttgtcaccattgcacaattttgtcctaatatatacatagaaactttgtggggcatgttaagttacagtttgcacaagttcatctcatttgtattccattgattttttttttcttctaaacattttttcttcaaacagtatataactttttttaggggatttttttttagacagcaaaaactatctgaagatttccatttgtcaaaaagtaatgatttcttgataattgtgtagtaatgttttttagaacccagcagttaccttaaagctgaatttatatttagtaacttctgtgttaatactggatagcatgaattctgcattgagaaactgaatagctgtcataaaatgaaactttctttctaaagaaagatactcacatgagttcttgaagaatagtcataactagattaagatctgtgttttagtttaatagtttgaagtgcctgtttgggataatgataggtaatttagatgaatttaggggaaaaaaaagttatctgcagatatgttgagggcccatctctccccccacacccccacagagctaactgggttacagtgttttatccgaaagtttccaattccactgtcttgtgttttcatgttgaaaatacttttgcatttttcctttgagtgccaatttcttactagtactatttcttaatgtaacatgtttacctggaatgtattttaactatttttgtatagtgtaaactgaaacatgcacattttgtacattgtgctttcttttgtgggacatatgcagtgtgatccagttgttttccatcatttggttgcgctgacctaggaatgttggtcatatcaaacattaaaaatgaccactcttttaattgaaattaacttttaaatgtttataggagtatgtgctgtgaagtgatctaaaatttgtaatatttttgtcatgaactgtactactcctaattattgtaatgtaataaaaatagttacagtgacaaaaaaaaaaaaaaa

SEQ ID NO: 125 - DNA, 3720 bp, Homo sapiens
aggatacagcggcttctgcgcgacttataagagctccttgtgcggcgccattttaagcctctcggtctgtggcagcagcgttggcccggccccgggagcggagagcgaggggaggcggagacggaggaaggtctgaggagcagcttcagtccccgccgagccgccaccgcaggtcgaggacggtcggactcccgcggcgggaggagcctgttcccctgagggtatttgaagtataccatacaactgttttgaaaatccagcgtggacaatggctactcaagctgatttgatggagttggacatggccatggaaccagacagaaaagcggctgttagtcactggcagcaacagtcttacctggactctggaatccattgtggtgccactaccacagctccttctctgagtggtaaaggcaatcctgaggaagaggatgtggatacctcccaagtcctgtatgagtgggaacagggattttctcagtccttcactcaagaacaagtagctgatattgatggacagtatgcaatgactcgagctcagagggtacgagctgctatgttccctgagacattagatgagggcatgcagatcccatctacacagtttgatgctgctcatcccactaatgtccagcgtttggctgaaccatcacagatgctgaaacatgcagttgtaaacttgattaactatcaagatgatgcagaacttgccacacgtgcaatccctgaactgacaaaactgctaaatgacgaggaccaggtggtggttaataaggctgcagttatggtccatcagctttctaaaaaggaagcttccagacacgctatcatgcgttctcctcagatggtgtctgctattgtacgtaccatgcagaatacaaatgatgtagaaacagctcgttgtaccgctgggaccttgcataacctttcccatcatcgtgagggcttactggccatctttaagtctggaggcattcctgccctggtgaaaatgcttggttcaccagtggattctgtgttgttttatgccattacaactctccacaaccttttattacatcaagaaggagctaaaatggcagtgcgtttagctggtgggctgcagaaaatggttgccttgctcaacaaaacaaatgttaaattcttggctattacgacagactgccttcaaattttagcttatggcaaccaagaaagcaagctcatcatactggctagtggtggaccccaagctttagtaaatataatgaggacctatacttacgaaaaactactgtggaccacaagcagagtgctgaaggtgctatctgtctgctctagtaataagccggctattgtagaagctggtggaatgcaagctttaggacttcacctgacagatccaagtcaacgtcttgttcagaactgtctttggactctcaggaatctttcagatgctgcaactaaacaggaagggatggaaggtctccttgggactcttgttcagcttctgggttcagatgatataaatgtggtcacctgtgcagctggaattctttctaacctcacttgcaataattataagaacaagatgatggtctgccaagtgggtggtatagaggctcttgtgcgtactgtccttcgggctggtgacagggaagacatcactgagcctgccatctgtgctcttcgtcatctgaccagccgacaccaagaagcagagatggcccagaatgcagttcgccttcactatggactaccagttgtggttaagctcttacacccaccatcccactggcctctgataaaggctactgttggattgattcgaaatcttgccctttgtcccgcaaatcatgcacctttgcgtgagcagggtgccattccacgactagttcagttgcttgttcgtgcacatcaggatacccagcgccgtacgtccatgggtgggacacagcagcaatttgtggagggggtccgcatggaagaaatagttgaaggttgtaccggagcccttcacatcctagctcgggatgttcacaaccgaattgttatcagaggactaaataccattccattgtttgtgcagctgctttattctcccattgaaaacatccaaagagtagctgcaggggtcctctgtgaacttgctcaggacaaggaagctgcagaagctattgaagctgagggagccacagctcctctgacagagttacttcactctaggaatgaaggtgtggcgacatatgcagctgctgttttgttccgaatgtctgaggacaagccacaagattacaagaaacggctttcagttgagctgaccagctctctcttcagaacagagccaatggcttggaatgagactgctgatcttggacttgatattggtgcccagggagaaccccttggatatcgccaggatgatcctagctatcgttcttttcactctggtggatatggccaggatgccttgggtatggaccccatgatggaacatgagatgggtggccaccaccctggtgctgactatccagttgatgggctgccagatctggggcatgcccaggacctcatggatgggctgcctccaggtgacagcaatcagctggcctggtttgatactgacctgtaaatcatcctttaggtaagaagttttaaaaagccagtttgggtaaaatacttttactctgcctacagaacttcagaaagacttggttggtagggtgggagtggtttaggctatttgtaaatctgccacaaaaacaggtatatactttgaaaggagatgtcttggaacattggaatgttctcagatttctggttgttatgtgatcatgtgtggaagttattaactttaatgttttttgccacagcttttgcaacttaatactcaaatgagtaacatttgctgttttaaacattaatagcagcctttctctctttatacagctgtattgtctgaacttgcattgtgattggcctgtagagttgctgagagggctcgaggggtgggctggtatctcagaaagtgcctgacacactaaccaagctgagtttcctatgggaacaattgaagtaaactttttgttctggtcctttttggtcgaggagtaacaatacaaatggattttgggagtgactcaagaagtgaagaatgcacaagaatggatcacaagatggaatttatcaaaccctagccttgcttgttaaatttttttttttttttttttaagaatatctgtaatggtactgactttgcttgctttgaagtagctctttttttttttttttttttttttttgcagtaactgttttttaagtctctcgtagtgttaagttatagtgaatactgctacagcaatttctaatttttaagaattgagtaatggtgtagaacactaattcataatcactctaattaattgtaatctgaataaagtgtaacaattgtgtagcctttttgtataaaatagacaaatagaaaatggtccaattagtttcctttttaatatgcttaaaataagcaggtggatctatttcatgtttttgatcaaaaactatttgggatatgtatgggtagggtaaatcagtaagaggtgttatttggaaccttgttttggacagtttaccagttgccttttatcccaaagttgttgtaacctgctgtgatacgatgcttcaagagaaaatgcggttataaaaaatggttcagaattaaacttttaattcattcgattg
